United States Patent Application Publication US 2007/0237770 A1 - sequence listing, part 8

SEQ ID NO: 787 - DNA, 49355 bp, Homo sapiens
  misc_feature (1)...(49355): n = A,T,C or G
tgaggcaggtggatcacctgaggtcaggagtttgagaccagcctggccaacatggtaaaaccccatttctacgaaaaatgcaaaaagtagtcaggcatggtggcgggcacctgtagttccagctgctcaggaggctgaagtgggtgaatcacctgagccagggaggcagaggtggcagtgagccaaggccgcaccactgcactccagcctgggtgacacaacaaggctccgtctcaaaaaaaaaaaaattgtatgcaaatgtttatggcagctttattcataatagccaaaaaatagaaataattcagatgttcatcaactgattaatggataaagaccacatggtggccaggcggggtggatcatgcctgtaatcccagcactttgggaggccgaggcaggtggatcatgaggtcagaaaatcgagaccaccctggctaacatggtgaaaccctgtctctactaaaaatacaaaaaattagcccggcgtggtgatgggcgcctgtagtcccagctactcaggaggctgaggcaggaggatggcgtgaacctgggaggtggagcttgcagtgagctgagatagcaccactgcactccagcctgggcgacagagcaagactctgtcagaaaaaaaaaacaaaaaaaacaaaaaaaaaaaacacatagtatattcatacaatatatgaagtgggtgaatcacctgaaccagggaggcggaggtggcagtgagccaagaccgtaccactgcactccagcctggtaacagagcaagaccacgtctcaaaaaaaaaaaaaaaaaaaaggtaagtatatagagtcaaaaagtagatttatggttgcccaggcatgggggtttgggaagaaataaagagtggctcctaatgtgtatagggtttctttttagggtgatgaaaatgttttaaaactgtccttatgaactcttccaatatgttaagcattattaaattgtaaactctaaatgggtgagttgtatggtcaataaagctattaaatcacaatccaggggctgagattaaaagagaagaaaaaacaatccatataatgtctgtttataattttcattttttcctgtacccccacccccccatcctcctcctttttttgagacaagatctcactcagtcgcccaggctggagtgcagtagctgataatagctcactgcaataagctgaaaattgtaatattagtagaataactataccttttctgtttattagctccttctcctcaacttataaatattttgaggttgaaattgcctttgcaaaattatgacaataagagaaatctgacatagttgagtccatcttgcttcagacctccaagctgtccttggtcatttctgtgcataggcctagctaaccttgggaagaatttagtttataatttaacttgaaagcaaggatgataacagtcccgccctaaaactaacaccctccttgcttagggaccaaaagcagcctttgcaagactttggttttttttttgttttttttttttttgagatagagtcttgctccattgcccaggctggagtgcagtggcacaatctcggctcactgcagcctccacctcctgagttcatgtgattctcctgcctcagcctccttgagtagctgggattacaggtgaatgccaccactcccggctaatttttgtatttgtagtagagatagggtttcaccatattggccagggtggtcttgaactcctgacctcaggtgatccacccacctcagcctcacaaaatgctaggattactgttgtgaagtccacaaaaataggattattggagggacctgagttctgctaaaatgcaggagtagtttctataatctcttactgcccaggaatcatgtggccagagatcacaagatttgtgacttccatagataacatcactattgtggaaactaagattggtttttaaagatttttttcagactgaccccacctggactcatgactcatgactcaactgatcctttggccctataagagctggactcagtgcaggaggcttgttttccacatccctatgatctcatcctcaaccagtcagtagcactcattccctagccccacccaacaaattgtccataaaaacccgaacctctgagccttcagggaaactgatttgagtattagctttagttgagcctcatgggctggctttgtgtcaagtaaaagctctactacaatgccgtccagtaaattggttttgtctgtgcagcaggcaggacaaacccttccgacgattataaggttgcttcaatcttaagagaaaagaaaactacctagttctttctctcattgttctttgattggtgtccttccttcccacctcattaaccaatgcagtctgatttccaccaccagggcccctacctggaactatttcatactgaggttgaaatggccttcagggctgggcgtggtggctcacacctgcaagcccagcactttgggaggctgaggcaggcggatcacctgaagtcaggagcttgagaccagcctgaccaaagtggagaaactctctctctactaaaaatacaaaattagctgggtgtggtggcacatccctgtaatcccagttactcagaggctgaggcaggacaattgtttgaacctgggaggcggaggttgtggtgagccgagattgcatcattgcactacagcctgggcgacaagagcgaaactctgtctcaaaaaaaaaaaaaaatggccttccagccaggcatggtggctcatacctgtaatcccagcactttgggataccaaggtggatggatcacctgaagctgggagttcgtgaccagcctagacaacatggcgaaaccctgtctctactaaaaatacaaaaaaaaatcagctactcaggaggctgaggcatgagaattacttgagcctgggaggcagagactgcagtgagccgagatcaggtctctgcactccagcctgggcaacaaagcggattctgtctcaataaataaataaatgacaaaatccaagggattcagtccccatcttgacctcttgggataattcatcactgttacacccttctggaagttgtttccttactcctataaaccaaaaagtatctgagacagctatcaatcaatttatcttgccaaggttaaggacatccaaaagaaataaaaacagaatcaaagaaatagtcggtggcctgtgcctttctccaaagatgattttgaaggcttcaatatttaaaggggaaatgtgggctgcaggggacagagggagggtacaataatctacacgttgcaaaagaaaaggagcagggaggggaatggtcaattatgtattcatctcacactcagtaaatgggcactttacataagatgaggcctggggtggtggctcatgcctgcaatcccagcactttggaaggccgaggcaggtggatcacctgaggtcaggagttcgagaccagcctgaccaacatggagaaaccccatctctactgaaaatacaaaattacccaggtgtggtgacagtttcctgtaatcccagctactcgggaggctgaggcaggaaaatcacttgaacctaggaggtggaggttgcagtgagccgagatcgtgccactgcactccagcctgggtgacagagcaagactctgtctcaaaaaaaaaataaaataaataaataaataaaaataaggtgaatatacagtagctacctgtggagatatttaaccttttatcagtagctatctgcctaggaacaaaagcaagccagtttcttgcatgacttagctttcagcttaatttttttcttttggcagagtgaactagggtcccaagtttattttcctttcgtactctcaagacaccaatcactccttgttctcctccggccaagtctcaagtctctttccctcctgccaactccttaaaggtacaagtttcataggatttttatccctaaggttttttctatttcacttaaaagacctttttctgggtcaactcattagtcatggcttcaattactgaactcccaacagaattgggctctgaccctgctatgaactttagggcaatggtttattcttctttacttatgtatttgtctgttcgtttgtttgtttggtttgtttgtttatttattagactggttctggcactgtcacccaggctggagtgcaatggcatgattgtagctcactgcagcctggaactcctgggctcaaaggatcttcctgcctcagcctcctgagtagctggggctacaggcacacatcaccacactgggctaattttttttttgagacagggtctcactatgttgcccatgctagtctcaaactccaggcctcaagtaatccttgagcctcatctcccaaagtgctgggattacaggcataagctaccatgccgggcccatagtttcaattgtttacaaagtgactccacctgtatgttccatggacacatcacaattatatgttcacatatcaactcactatcttcccctgagagcagcatctccacttgttatccccatttggttccattatccatcagttaccaaagtcatcactagattccattatctcctgcctcagccccgagattcaatgtcactcaaccctatggtttctgtctcctttgcagttcttaaatccatctcctttccaccatcctgcccccagtttatttatctgggaggtggcatcgagggaggaagagggatgtgcattagaacaacctgtgtaatgttaaccagaaaacatacaagcccagcgtggtggttcacacctgtaatcctagtgctttgggaggcaaaggtgggatgatcgctggaggccaggagtttgagaccagcctgggcaacacagcaagaccccatctctacacaaaattttaaaaatcacttgggcatgatggtgcatgcctgtagtcccagctgcttgggaggctgagacaggagaatcgtttgagcccaggggtttgaggttacagtgaactatcatcgcaccactgcactccagcctagattacaaagtgagacctctcaaaaaattaaataataaacaaacaaccagccgggcacggtggctcacgcctgtaatcccagcactttgggaggctgaggtgggtggatcatgaggtcaggagttcgagaccagcctggccaagatggtgaaaccccgtccctactaaaaatacaaaaaattagctgggtgtggtggcgcacgtctgtagtcccagctacttgggaggctgaggcaggagaatcgcttgaaccggggaggcggaggttgcagtgagccgagatcatgccattgcactccagccagggcaacaagagtgaaactccgtcttcaaaaataaataaataaataaataaacaaacaaccattacataccctaccccatctccagagattctgaacctgtatatactcttcctcatcttcactgtccttacccattttcaacactgctggcagaaagatccaatgatccttcaaaaatgcaaactgtctgtttagcctttcactgggtctctaggatgaaagtccaaactcctctcaaacccgtcaccttgggttcttgcccacagcttccacctcacctgcggccactccctatggacatcccgcactcaacccttatcagattgcagcacttgctgttcctggaacacgccttctttcctcgccttagtgttctcttctctgtggatatcctctgtgatacctttccacttggtagtcactttgttcaaaacgcctctcctgacttctctaggcaattagttatttctgtcagaggtgttggagccagagcaactctatgttgaatagaggctgagacctactgggctgcattgccaggaggttagggattcctagtcacaggatgagataggaggtcagcacaagatatagatcataaagactcagcggatgaaacaggatgtgaaaaagaaaccagccggccgggcgcattggctcagcagacggatcacgaggccaggagttcaagaccagcctggccaacatggagaaacccagtctctactaaaaaaaaatacaaatttagccaggtgtgttggactactacgcgcctgtagtcctaactactcgggaggccaggagttcaagaccagcctggccaacatggagaaacccagtctctactaaaaaaaaatacaaatttagccaggcgcgtaggactactatgcgcctgtaggcctaactactcgggaggctgaggcaggagaattgctggaacccgggaggcggaggttacagtgagccgagaccgtgccattgcactccagcctgggtgacagagcgagactccatctcaaaaaaaaaaagaaaccagccaaaacccacaacaaccaagatggtgatgaaggtgacctctagttgttctcactgtttattgtacgctaattataatgcattaacatgataaaagacactcccaccagtgccgtgacagtttataaatgtcacagcaacatccagaagttaccctatatagtctaaaaggcagagaaatcctcagtcctgggaaatccttgcccctttcctggaaaattcacgaataaccctctccctagttagcatgtaatcaagaaatagccataaaaatagccaacaaggccgggcgcagtggctcacgcctgtaatcccagcactttgggaggcaggtggatcacttgagatcatgagtttgagaccagcctggcctacatggcgaaaccccatctctactaaaaatagaaataaaaaaattacctgggtgaggtggcacgcatctgtaatcccagctactctgtgggctcagcaggagaatcacttgaacctgggaggtggaggttgcagtgagccgagatcgtgccgttgcactccagcctgggtgacagagcgagacttcatctcaattaaaaaaaaaaaaaagaaaaagaaaaagccataagcagccctcagtgctgctctgcctatggagtaaccattcttttatttctttacttctctaataaatttggtttcactttatgagctcgtcctgaattctttcttgtgtaatattcaagaaccctcttttggggtctggattgggacccctttccagtaacatttcctcttctctggtcccacaatactttgtccataagtgattctgtacttattagcagataattacaagtatttttgtttatacaatgtcttaccccctaaactgtcaatagattttgttcaatttatttttgtatgctctaatatagagcctggcacataatgtgtattcaacaaatgtttactgaataaattttcaagggaataagttttaatttctatctttctgattgcttagtgtttaatatattataaaaaatatgattcaggccgagcgtggtggctcatgcctgtaatcccagcactttgggagactgaggcgaggggatcacctgaggtcaggagtttgagaccagcctggacaatatgatgaaaccttgtctctactaaaaaatacaaaaattagccaggcgtggtggtgtgcgcctgtagtcagagctactccagaggctgaggcaggagaatggctggaacccgggaggcggaggttgcagggagccaagatgacgccactgtactccagcctgggcaacagagcgacagactccatctcaaataaataaataaaaaaaaaataaataatatgatgcactttcaggatagcatgctctttgaatctctttaaatagtgacagtttatatttgaacagttattttttcatttttcaaagcacttttccccaacattttattatgaaaatctccaaatatatgggggaaaaataattgtaagtgaacacttgtgtcgggactcagaaactgatagcccaaaatatggggctttgaccggctgaatggaagcctcaaggtctctctgacctcactgcccagcaccatctctcccaaagcacaggatgaagttgaagttcctttatctggctacaatccgaacccaccaaaaggaacaattgttttttcttcccctccttgtaagaccaaaaatgtaaccacctgaacagaccctttcacaagataatgtgcaagttcatccctgtgccctgatccattcactttccctagtcatctcctcaacagaatgcctctgctcccctctccccaagtctgttggccaggatggtagacaagcttctgaaccccgttgggggtgtgtaatcactctgtgattctccccatgtacatgttaataaatgcatatgccttttctcccattaatctgccttttgtgagttgatttttcagcaaacttcagagggcaaagggaacatttttcccatggtccctatacccatatatacccactacctagattcaaaatcaacattttgctatatttgcaaaacacttttcataggctaattttattatcacctttttaaaaaaattctttttacaagtactgctccttgtggagcaggactactcgatagacagtgtgcccagagtagcttattatcattttttatttcacctaatgactaaggtatgattctatgttttatagataaggaaactgaaactgaggctttaatgacttccaaggagcttgtctgccagaagttgtaatcaacttgtgccagctgatctgtccacaccctctatccacaggtgttagatatgtaacctaggtctgaaaaatatttagaatattcttgtgatgaaaagcttgcaattccacaacacaggggaatcagcaaaatcatgggaaaaccaatagaatacatttctaactcatgaatcattcagagaaaaatccagtcttgggttttccctccccctcatcccatttctattcctgattagtcatcatttcctgcccagcctgtctgagatgtttcttccatcctttcttttccagtaacagtaacctggtgcgggtctacagtatctgttatctcagctgatttcctttctgccttttcatgaaccagagacatgtgatttccaattaaagcacagccctgaccatgtctttgctcagcttacaaaacgtcaacggctcgcagctatccaccgaattaagcctactataatccccttccttccacactacaacctatccacgcatctgtcctcttactccttagcttccatcttacatgactaagagttgtttccccaaatacacccttatttacttttttcatttataactcaccaccaccccctccaaagtttcacgtgggtaaattctagacctccacgtcataggccaactcaaatgccaatccttctaatgaaccttctagagagcccgggcctgttgtcatctctatagccaatctttggcatcttgtggcaataatctcattctaccttgtagagctttctggtctgacttcccttgccaccttctgctccctttgcctaagtataacacttttgaggaaaagaacgctgttttaatcatcgtcgcctcgcccacaggcggtgctttattgtgcttaatatcgtttaacgcatcacacactgccgagggggtcggaggcggacgccttttgctgtatccacacagacccgcgcaggcacacacgtaggccgtctgccactctgacagacacgtgtcccctgggccacagccctggaactgtctcgggattcccagcctgtgggcgcttccatgctggccagcggaaggggacgcttttttcttcagaacagctccaacggatacctcttattttagaccgcctgcggattctatctataaatcagcctaagccccgcttccttttaaaacaggattacgccgggtcgagggagcctggcgtggccgcgcagtggccgggtcccgcggattcccctccagctcccgcttggtagcgcccgctttgtcagcgcgcagcgctcgccgggcgccctgcaggtctcgccaggtctcacagcagacggtgccgacgcagcggtgttgcacctccctctccggctctgctgcccgggatttccccagaacctgcgccgcgcgagaaggagcctgggagcatccgcccacactgcccggacagtcggctcgactcggtgctctcggccccagccgggctccgctcctcgggcgcgcgaggggccgtggtggcggcggcgcccggcatgtttcatagtccgcggcggctctgctcggccctgctgcagagggacgcgcccggcctgcgccgcctgcccgccccagggatgcgccgcccgttgtccccgccggctgctgttcccaggcccgcatccccccggctgctggcggcggcctcggcggcctcgggcgccgcgaggtcgtgttcccgaacaggtgagtgcaccccagttccgggcggagaacgccacggccgccaacgcgcggccgccacctggagaccgcgcggaatgaatgagaagcccggggctgccggtcgtggagtctggcctgaaagtgggtcctttaccggagcaaccttctgcgttccctttttcctctttccctgttccccgacttgcctggggcttgcatcaaagctagtaagaactgggagactgtattcaggttcccgcttgacccttagaggccatgctttcagaatttcttgttcttgaccgttaaatttcccccttccgaggccgcgagttactatgttggttacattttttattgcacgacttaacggaaatttttatggaaaaaaaaatctaaatgatgcttatttgcttatatagctnnnnnnnnnnnnnnnnnnnnnnnnnnnnnnnnnnnnnnnnnnnnnnnnnnnnnnnnnnnnnnnnnnnnnnnnnnnnnnnnnnnnnnnnnnnnnnnnnnnnnnnnnnnnnnnnnnnnnnnnnnnnnnnnnnnnnnnnnnnnnnnnnnnnnnnnnnnnnnnnnnnnnnnnnnnnnnnnnnnnnnnnnnnnnnnnnnnnnnnnnnnnnnnnnnnnnnnnnnnnnnnnnnnnnnnnnnnnnnnnnnnnnnnnnnnnnnnnnnnnnnnnnnnnnnnnnnnnnnnnnnnnnnnnnnnnnnnnnnnnnnnnnnnnnnnnnnnnnnnnnnnnnnnnnnnnnnnnnnnnnnnnnnnnnnnnnnnnnnnnnnnnnnnnnnnnnnnnnnnnnnnnnnnnnnnnnnnnnnnnnnnnnnnnnnnnnnnnnnnnnnnnnnnnnnnnnnnnnnnnnnnnnnnnnnnnnnnnnnnnnnnnnnnnnnnnnnnnnnnnnnnnnnnnnnnnnnnnnnnnnnnnnnnnnnnnnnnnnnnnnnnnnnnnnnnnnnnnnnnnnnnnnnnnnnnnnnnnnnnnnnnnnnnnnnnnnnnnnnnnnnnnnnnnnnnnnnnnnnnnnnnnnnnnnnnnnnnnnnnnnnnnnnnnnnnnnnnnnnnnnnnnnnnnnnnnnnnnnnnnnnnnnnnnnnnnnnnnnnnnnnnnnnnnnnnnnnnnnnnnnnnnnnnnnnnnnnnnnnnnnnnnnnnnnnnnnnnnnnnnnnnnnnnnnnnnnnnnnnnnnnnnnnnnnnnnnnnnnnnnnnnnnnnnnnnnnnnnnnnnnnnnnnnnnnnnnnnnnnnnnnnnnnnnnnnnnnnnnnnnnnnnnnnnnnnnnnnnnnnnnnnnnnnnnnnnnnnnnnnnnnnnnnnnnnnnnnnnnnnnnnnnnnnnnnnnnnnnnnnnnnnnnnnnnntatattttaaaatggtcatctggaatgagattgaagccaagactttaaactattcgcattgttggcagatatttaggtatttcccaatctagtatcaaactcctggcctcgagttatcctcagactctggagcagttgagatttgcaggtggaagccaccatgcccaacttagtcattttaaaattaggatgttgaattggttgctggagattctgaactatattgttccttagagtgaacttgacagttagattccccacccccacccccaatttcgtaggaatgtggtacattgtgaaataactgccagaatgagtatattgcctgataacttttttcttgctggaaattttaagaacaacattgttagaggtttgaggtaggaaaagtaaaagaaaaccaggtgatgtcttctgtaccagcttatatcttaaattccctcaaagtctcagaggcagggttagtaggtacctcctcatgggaatactgttagcttgtgtaaaacatagatggctgtgttatctgagtaattactgttatctgagtaataatatcaggtcagattggaatgttgggcttttgacccaagaaagtgtttaatgaacttcttttaagaaatcccctgaaaccccctagttttacagataaggaaattgaaggactttatggtacttaaacttttgtaggcagttactataaagtctagacaattttcctgttcatgcatttttagcttcagcagcttgttggaagaaacatgcctgcattgattcattcattgcttgttcactcattccagatctttacagaatgtctcacacaatgtaggtgctttattatgggagttaaaaacatgagctttagtcagtccctaaggagtttactgcccagtaagagatgagatttgcacaatgaaatggctgtttaatgaaatgaaacaccttttattctcttgacttggaaatggcacaagggtgcaggaaagcaggaagtcccttttgggcttctagaaatgggtggcatttcagctggctcttgaagcatggttaggattggaagagattactataaagcgttttgtttggaaaaagcaggagtaaatgcagaaaggcatgagacacacacagatgaggaagggtgagagaagaggcactttgcaaaaatggacattgttttccaaagagcctcagacccagcactaagtgctttttaattttaattttaatttttattttttttgagacaaggttctctcgcactgttgcccaggatggagtgtagtggcgccacctctgctcactgcaacctccacctcccaggctcaagcagttctcctgtctcagcctcctgagcagctgtgactacaggcacacgccactgtgccgggctaatttttgtatttagtagagacaggatttcaacgtgttgcccgggctcgtctcaaactccccagctctggtgatccacctgctttggccttccaaagtgctgggattacaggtgtgagccactgcgcccagcctatgaagtgcttttttaaaatgcagattcttggatcctactgtagacctattaagtctgagtcattcatgatgggccctggattccacataaccaaatgaaatgacaaaaagaataactccagattgttcttctatgccctcaaatttggacatctggcacccatatgtgagagagacattgaaggggccaaaagctcctctccactcctgagccttgtggtggggagtagtgagtcccgacagctgtccacatttgctaatcagttcctgcataacttatgccccttggcaattggtagttattgggaagataagtacagtccctttggagttatcagattccaggttgttagaattaaaaggtgaccctagggatgatctcggtgtttggctttcttttctcaaggatagcagcccccctaagaagtagcagttgccacagttactgtactggatgaaacgcagttggaagtcatctgtggatttataaatgctatcctccacatccctcctcctcagagaatgaagagctggctgaactactgttctctaccattagaacatttgctttttttcatggtacaatttataggcaaatgccaccagctcatttgagaaggcagctttatttaatatgtcctttaactatgtgagtaaactgcttatgagagagaagaaacgggaaagcttgtcattatcaagctgctatggaataaattgctttccttgtgggaaaactaatgtatgatttttctgttagcattcaatggcaacagtttaaacatggtgaactggggttctttggggttaataaccatggctccagattcacattccacacacttaacatttgtaaatcatttaaccttgcttgctgtctcaacactagactttacctggaacaaatgaataagatcaattgatagcaatttatccacaagctttattgaatagtacatgtaaaaggtgacatgactaattgcagtgggagttgagaagaaagaaatcagtgtggctgaatttgtcaagaaatgctttgcttctaataggtgaaaaaggagggtgttttggaaggggacagtttgcggggtggtgggggcaggcagagaagaccacacacacaatgcctggaagaaggtggcgctcgcatgcaggagctgtggcaagcatcttaggaaaaggggtagaggcagaatcatttgggacagttgttaaaatgcagatttctggcctttcagccctctgcttgatcagtttcctgtggagaagcccggtggagtgcatatttaacaagtgcctcaggggattcttccaaaaagattagggagtatttatgagctctgcccctcctttccccaaaggtacttattcctggaaagcttgagaagctctggagaggattctggaagagccttaagacctttggtctggccgggcacagtggttcacgcctgtaatcccagcactttgggaggccgaggtgcggatcacttgaactgaggcattcaagaccagcctgggcaacatggtgaaaccctgtctctacttacattagaaaaaaaatagccaagtgtggtggtgcacacctgtacatcccagctgcttcggaaactgaggcaggagaatcacttgaacccaggaggcggaggtatcagtgagccgagattgcgccattgcactccagcctgggcgacagtaggagcaatactctgtctcaaaaaaaaaaaaaaaaaaaggatctttgagcttggggcctaaggcagttcaagagacccctgagaaagaacattgacccccgaaaaaagcagctttaaaaaattgtatattttgtcgagacgggttttgccgtgttgcccaggctggtctcgaaatcctgggctcaagcaatcctcccgcctcagccatccaaaagtgctgagattacaggcatgagccatcacgccccgccaaaagcagcttttaagaaagggnnnnnnnnnnnnnnnnnnnnnnnnnnnnnnnnnnnnnnnnnnnnnnnnnnnnnnnnnnnnnnnnnnnnnnnnnnnnnnnnnnnnnnnnnnnnnnnnnnnnnnnnnnnnnnnnnnnnnnnnnnnnnnnnnnnnnnnnnnnnnnnnnnnnnnnnnnnnnnnnnnnnnnnnnnnnnnnnnnnnnnnnnnnnnnnnnnnnnnnnnnnnnnnnnnnnnnnnnnnnnnnnnnnnnnnnnnnnnnnnnnnnnnnnnnnnnnnnnnnnnnnnnnnnnnnnnnnnnnnnnnnnnnnnnnnnnnnnnnnnnnnnnnnnnnnnnnnnnnnnnnnnnnnnnnnnnnnnnnnnnnnnnnnnnnnnnnnnnnnnnnnnnnnnnnnnnnnnnnnnnnnnnnnnnnnnnnnnnnnnnnnnnnnnnnnnnnnnnnnnnnnnnnnnnnnnnnnnnnnnnnnnnnnnnnnnnnnnnnnnnnnnnnnnnnnnnnnnnnnnnnnnnnnnnnnnnnnnnnnnnnnnnnnnnnnnnnnnnnnnnnnnnnnnnnnnnnnnnnnnnnnnnnnnnnnnnnnnnnnnnnnnnnnnnnnnnnnnnnnnnnnnnnnnnnnnnnnnnnnnnnnnnnnnnnnnnnnnnnnnnnnnnnnnnnnnnnnnnnnnnnnnnnnnnnnnnnnnnnnnnnnnnnnnnnnnnnnnnnnnnnnnnnnnnnnnnnnnnnnnnnnnnnnnnnnnnnnnnnnnnnnnnnnnnnnnnnnnnnnnnnnnnnnnnnnnnnnnnnnnnnnnnnnnnnnnnnnnnnnnnnnnnnnnnnnnnnnnnnnnnnnnnnnnnnnnnnnnnnnnnnnnnnnnnnnnnnnnnnnnnnnnnnnnnnnnnnnnnnnnnnnnnnnnnnnnnnnnnnnnnnnnnnnnnnnnnnnnnnnnnnnnnnnnnnnnnnnnnnnnnnnnnnnnnnnnnnnnnnnnnnnnnnnnnnnnnnnnnnnnnnnnnnnnnnnnnnnnnnnnnnnnnnnnnnnnnnnnnnnnnnnnnnnnnnnnnnnnnnnnnnnnnnnnnnnnnnnnnnnnnnnnnnnnnnnnnnnnnnnnnnnnnnnnnnnnnnnnnnnnnnnnnnnnnnnnnnnnnnnnnnnnnnnnnnnnnnnnnnnnnnnnnnnnnnnnnnnnnnnnnnnnnnnnnnnnnnnnnnnnnnnnnnnnnnnnnnnnnnnnnnnnnnnnnnnnnnnnnnnnnnnnnnnnnnnnnnnnnnnnnnnnnnnnnnnnnnnnnnnnnnnnnnnnnnnnnnnnnnnnnnnnnnnnnnnnnnnnnnnnnnnnnnnnnnnnnnnnnnnnnnnnnnnnnnnnnnnnnnnnnnnnnnnnnnnnnnnnnnnnnnnnnnnnnnnnnnnnnnnnnnnnnnnnnnnnnnnnnnnnnnnnnnnnnnnnnnnnnnnnnnnnnnnnnnnnnnnnnnnnnnnnnnnnnnnnnnnnnnnnnnnnnnnnnnnnnnnnnnnnnnnnnnnnnnnnnnnnnnnnnnnnnnnnnnnnnnnnnnnnnnnnnnnnnnnnnnnnnnnnnnnnnnnnnnnnnnnnnnnnnnnnnnnnnnnnnnnnnnnnnnnnnnnnnnnnnnnnnnnnnnnnnnnnnnnnnnnnnnnnnnnnnnnnnnnnnnnnnnnnnnnnnnnnnnnnnnnnnnnnnnnnnnnnnnnnnnnnnnnnnnnnnnnnnnnnnnnnnnnnnnnnnnnnnnnnnnnnnnnnnnnnnnnnnnnnnnnnnnnnnnnnnnnnnnnnnnnnnnnnnnnnnnnnnnnnnnnnnnnnnnnnnnnnnnnnnnnnnnnnnnnnnnnnnnnnnnnnnnnnnnnnnnnnnnnnnnnnnnnnnnnnnnnnnnnnnnnnnnnnnnnnnnnnnnnnnnnnnnnnnnnnnnnnnnnnnnnnnnnnnncttgatgcatcctttctagctgtcttcctttcccttttctatctttcctccaactctgaggttccagtacttaaacagctctgtttgccgatctgcaaatatgcttgtgactgcaaatatcttgtctagtacagggtgcaaagtaagttacactgcagattctaataatacctgggatataatacttttctatttcctcttgtgtgttttgcttttatggatgctaattatcattgaaggtctgctgaaggaaaatgtttatctttcaaatcttgtaggtcaaatagactctctgagacttagttctagaattagtttaatattttatttttttgagatggagtcttgctctgttcctcaagctggagtacgatggcgcgatgtcagctcactgcaacctccgtctcccgggttcaagcgattctcctgcctcagcctcccgagtagctggggattacaggcccctgccaccatgccctgctaattttttgtatttttagtagagacggggttttgccatgttggtcaggctgttctcgaactcctgacctcaggtgatacacccgcctcggcctctcaaagtgctgggattacaggcaccatgcccggccttgcctctgaacttttaaagaccattgtgagtattgattatctgtagaagcttacaagatttccttatctttggtattcaaaagatccatcaggttgaatgtctcagcatctgatgcgcccatccaatctaaagacatgccttagcacattaaaagtttgtatcggttgtctactgtattgtctcttgttctcatgttcttgaactcctgttagattgttggccatatggatctatcctccgtgtctattcatcctttttttttttttttaaattattttagagacagagtctccactttgtcacccaggctggagtgcactggtgtgatcatagctcactgtaacctccaactcctgggctgaagtgatcctcccacttcagcctctgaagtagctgggactataggtgtgctccaccatgcctacctacttttatttttttgtagagacacgggtctcagctcagactggtctcaaactcctgggctcaagcagtccatctgcttctgcctcccaaagtactggattacaagcatgaggcacctagccaggcctccattcatattttagtgtttttatctcttctctgttgcatgagattttctgaaaatttttgttctgcagtcattttaaattcctagacatttctagttgtttaattgctccttttttcatagaaacctgttttgtgtctataatgtctctcgtactttaaatatatcaagatgtgtgtgtgcctgtttctcctttaggcctctttcctggagaggaagggagttttgcatgttgttttatttgtttgtttgttttttgagatggggtctcgctctgtcactcaggctggagtgctgtggcgtgatctcagctcactgcagcctccatcaacctggttcaagcactcctcccacctcagcctcccaagtagctgggaccacaggcatgcaccatcatgcctggcccagtaatacaacagttactgtatttttagtagagacaggttttccccgtgttggccaggctggtcccaaactgctgagctcaagtgatcggcccaccccggcatcccagaatactggcattacaggtgtgagccaccgcgcccagccagttttgcatgttctgagtgggaaggtaatctggagaacgggcagccaggcttccttgttgaatgcgtgagagggagcaggctggtaactaccgcctttgtcaaagaaaggagggtttccttctatattcttcagtccaaccccttccccgctttttaaaaccatccttgagtttcagagttagctcctgatctggtctgcttctctttcaggtccattcacctttgcaagccattctaaggctatcacccattttctttggggtattctttggttctatggagcaaccaaaagccacccttcccggctttgtctgtgagagaggggacacatgtaactagtgccaccgttcactttcattcttgaacgaattgccctaacagttaccccctcagcttctcctgccctttctatttcttgattcagcttggagtttcttcaaggtgctcttgggaaaaccacatttacctttggtaacttgtactgccctttccttctggtttctctgttaattcaaacttgtttctgtcttcttggaattcctccaaatatttgctccattgatgtcatgcatcccttcttgttttccaatgttattgatgcattctttaaaaaattttaaagaggccaggcgcggtggctcacgcctgtaatcccagcactttgggaggccaaggcgggcagattgggagttccagaccaacctggccagcatagtgaaaccctgtctctactaaaaatacaaaaattagccatgcgtggtggcgggtgcctgtaatcccatcagcgactcagaaagctgagggaggagaattgcttgaacctgggaggcagaggtttcagtgagccgagatggcgccattgcactccagactaggcaacagagcgagactccgtctcaaaaaaaaaaaaaaaatttaaatataggcactttatttcttcaagatcttaggaaggagagaaagtaaatgtattttctactttgctgtcttggcctagaaccaacctgcccaatgatatgcaacatattctttttttaatatgtgccttaactattcaagcaatgcactgggaatttgtatatgaaaattgtttcccctcctttttaagtgactaaacatcttttattggttttatgatatatatacaaatagactagtggtgagcatagctgccttccaaatggactatacaattttattttttatttatttttttagatgagtcttgctctgtcacccaggctggagtgcagtggcgcaatctctgctgactgcaacctctgcctcctgggttcaagtgattctcctgccttagcctcccaagtagcagggattacaggcatgcgctaccacgcccagctaattttgtgtttttggtagagacggggtttcaccatgttagtcaggctggtctcgaactcctgacctctggtgatccacccatcccagcctcccaaagtgctgggattacaggcatgagccaccgcccctggccaattcttttagggatgggggtctctttatatagcccaggctgaactcaaacccctgggtttaagggatcttcctgcctcagcctcccgagtagctgagactataggtatgtgtcaccatgtttggctcattatttaaaaatttttcatacttcttttttttttttttgagacagagtttcactcttgtcacccaggttggagtgcagtggcacgatctcggctcactgcaaactccacctgctgggttcaagttattctcctgcctcagcctcccaagtatctgggattacaggtgcccaccgtcacacccaactaatttttgtatttttagtagagatggggtttttgccatgttggccaggctggtcttgaattcctgacctcaggtgatctgctcgcctcagcctcccaaagtgttggaattacaggtgtgagccaccatccctggccttttttttttctttttttttttgagacagggtcttcctctgtcacccagactggagtgcagtggcgcagagccagctcactgcaggctcagcctcctgggctcacgcaatcctcctgccccagcctcccaagtagctgggaccacaggtgcatgccaccatgcctggctaaaggctcattttaatatatctagagcagaggttggcaaactttttccataaagagccagctagtaaatattttaggctttctgggccatatatctgtcgcagctactcaactctgctgttgtagtgtgaaagcagctatagacaatatgtaaactttatttatggacttttttttttgagaccgagtctggctctgtcgcccaggctggagtgcagtggcgcaatcttggctcactgcaagctccgcctcccgggttcactccattctcctgcctcagcctcccgagtagctgggactacaggcgcccaccactaagcccggctaatttttgtatttttagtagagacagcatttcactgtgttagccaggatgatctcgatctcctgacctcgtgatccgcccgcctcggcctcccaaagtgctgggattacaggcttgagccaacgcgcctggcctatttatgaacattaaaatttgaatttcatatcattttcacatgtcatgaaatattactgttcttaaggttccccccctccccctaccatttaaaaatataaaagcctttcttagcttgcaggcagcacaaagacaggatgctgccagagttagctcatgggtcacagtcggtagatccctgatctagagaggactctgtacagtcagcagaaggcgccttatagtttcatatttccactcacactgtaaaaacacgtcatttttccaagtgtcccagaaatgttagtgatgggagatcaccagatttttaggttttgctttttcacatttttatttcagaggattgtgctagaaaagcccagcttgtggaaatgatttgtcagccaatagacaattgagcaccagtcgaacatgttaaactaagcatttatcatggaggggattcccttctctttagagagcttttccatatgagtctgtcctggctgaaggtatggttcagtcttgtctggatgacgcttcagctttcttgtctggtctgtgactgccacctggcaaagagaggttgtttggattgtcacactcagtctaggtgcttgtatttttagacacgttaggttgagagttctgaccttcacttgatatctctggtaatgccaagcgggtcgtggcactgctttgtacactctgtgctgtggcagtgtgtgtgtgctgtgacgacagtgacgtcgacagatggaggaggtgcaactcgacctctgtttctttctggcctgaagaatgggctgctgtgtgcgcctggggctaggcaggacagctgcatcgctgttgccctgaggcagtatcagcacagctggagatgctgacgagcagcagtccaaggtgcaggtaactttctccagggccagcccccttactagttgttcaatctagagaaagctgtgcagatacccacttcaccagatttgggacagaataatgaaaatacatggaagcagtctggcacattatctcgaatgttaataatagccttctctttttgttttgttttgttttgttttgagactgagtcttgctctgtcgcccaggctggagtgcagtggcgtgatctcggctcactgcaacctcctcccaggttcaagcaattctcctgtctcagcctcccgagtagctgagattacaggcacccaccaccacatccagctaatttttgtatttttaatagagacgtggtttcaccatgttggtcaggctggtctcaaactcctgacctcaagtgatccacccaccttggcctcccaaagtgctgggattacaggcgtgagccaccacgcccagctgaataatagccttctctttatgcctaggaaaaaagtgagttttacagaatgaaacagaatagctaacatttagctaatcacttaggatgtgccaagtacctcttgtttaactaaattaatcctcacagtaaccaaataaaatagattacacttacctatatgaagaagataatgaagaagcagagaggtaaataagttattcaggatcctattagtaaacagtggagccaggatttggattcaggcagcctaacttgagtccttgctttaagactttcttgcctctgcggaaccgcaggccgaacttcctggagagagctgaggctttagctatgaggctcagtactcgaggcaggcctgtcatattcagtcagtggcactcaataacagacttggagactggtcggtcactaactaaaatatttgactcctgccagaaagtaataccttcttaacttggcacttagtttatttttatttttattttaaatttaatataagagatggggtctcactacattgcccaggcgggtctcgagttcctgggctcaagcgatccttctgcctaaattggcacttagaatccagtctctaggatctggaaattcatgtcatataagcccacatcatgcaaaatttgaaggtggctgcattcatttgccagatggaccttcaggggacgtgtcacattgtttgagttttgattttctagctgatgggtgcgcacaccacagtttcacaaaaatttagaaagagttactttttttctttttgagacaatcttgctctgtcacccaggctggagtgtagtggtgcaatcttggctcactgcaacctctgccttccaggttcaagcgattctcatgcctcagcctactgagtagctgggattacagggctgccaccacgcccagctaatttttttgtatttttagtagagacagggttgttggccaggctggtctactgacctcaggtgatccacctgccttgccctctcaaagtgctgagactacaggcgtgagccaccgcgcctggcctagagttacgtttaatggtgacttaggacctcattacacttttgaaccttagtgttcttatctataaagtggtgtaaataatggccaacaggttcttgagcaggtaactggttacagcaagtaaaaatgcttggtataccataaaatgctccaccaataaaaggtggtcctccatcagtgtttgacagaatttcttggtactttgctgtcacttgccatcttttattaacattgtttaaagcactgggctggatcctgggggaaatggtaaataagggaaacagtccctgcccttgggaggcttaaagtctcatgagtaaaggacagagattgtggtgcaaatatccaagggtaccctaagtaggaaaaatgggccaggtataagaaaaggagagccattggttgatccatagagctaagcctggttgctatgaatctttattgattccttcaatatatattaaataaatatattgtatatccaacatccaggctgctttatgttggtggttatcttgtgtgaattctcgtttgtattgaagatggccaggtattctggaacctactctaagaaggctaatgaaaatcagctgctaaattagcttagtttttgtgaggtgttcaacacgcatggccagtagatggcagcattggattgctgtttcagagatgccttcttgtgccattgatggcttagtttttgtgtgttgtgtgtgcttctaggtttcctcgggcggaggttgatcagcttccatagcttcccaggtgcgtactcaagataatcctggcttttgcttggtttttaatcagcgtttttgccaggccaccgtttcaagatactaaacgcaaactgtgagagaagtaattagacgctgaatggtttgggcaaagcctagaacaggcaattggtgggcagctagaggaaggaaacctgtgtggagctgtggagagtggtcggccctgagtgactgctttctttttttttttttgagatggagtctcgctctgttgcccaagctggagtgcagtggcgcgatctcagcttacggcaggctctgcctctggggttcacgccattctcctgcctcagcctcctgagtagctgggacaacaggcacccaccaccatgcctggctaattttttgtatttttagtagagacggggtttcaccatgttggccaggatggtctcgatctcctgacctcgtgatccacctgtcttggcctcccaaagtgctgggtttacaggtgtgagccaccacgcccggcctgccctgagtgattccttagtgctattaggagtgcttggaatggtgggccaagtcagtttgggtctcgactgttggggttgtcatccagcattctaattattgatgtgaaggtgtttcattgcagcccgaccattttccttatggtcgcattcttaggaacttgaattgtgatctgcctagattgctttagtagtgtgtagtaattggtagtattaagggtgtacatatattcaaatatatttgtgattagcccagttgtgggttttgttttgttttgttttagagggagtctcactcttgttgcccaggctggagtgcagtggcatgatctcagctcactgcaacctctgccttccaggttcaagagattctcctgcctcagcctcccaagtagctgggagtacaggcgcccgccaccacgcccggctaatttttgtatttttagtagagatagggtttcaccatgttgttcaggctcgtctcgaactcctaacttcaggtgatccacccaccttggcctcccaaagtgctgggattacaggggtgagctaccacgcccagcctcccacttgtggtttttaggaaagtaaaggtattgccaaatgggagtttacatacttgctactgtgtttcagaaatctaaataatctgaattctctggcagttcttcaaaggctgtttataaaagtaagaagagttatattcttatacagtaaaatagcagtgagggcttagcaatagtggtacaaggaattaagacatccagttttaaatgtatgtaaaaatgtgcttatagaattagtcagtggcaggggatggggtgatgttgctaaatggacactaggcagaagagataaagctatttaatgtgcctgttaactatatgaattctgtaacttgtgtgttgcattgagagtgatggctggcccattgccgtgactcatgcccagtcccaacacctagggaggctgaggtagaaagatcactgaaggccaggagtttgaagccagcctgggacgcttagtgagatctcgtctctacttttttaaaaaaaaatttaataaaaaaataaaatgagaattactgtgtttgtgaaaaatgaattgtgagcagaagccaaatatgggtggaatcaaatccaaaatttccaaacacataaaattagacctgaagccaatttgagtgccaaatagagttcagcagaggttttgtcaagatttggtacttttcagtatcttaattgccacatgggtaaattatttgtgctgtttagccttaggaaataagctttgaatattgagctattgtgaaggttcgaaaatctttttaaagtcctgaatagcaactcctattaaggcataaaacttaagtagatggtttgaaatcctggaaatcaacatgtatttatgtatgaaaggaattttttttaatgattgatactcgaaaattaaaaagtgaatgtgaattagccgagggtggcggcgtgcacctgtagtcccagctacttgggaggctgaggcaggggaattgcttgaccctggggggcggaggctgcagtgagccaacatcgcgccactgcactccaggctgaggaacagagcgagactccatctccaaaaaaaaagtaagtgtggccaagtgcagtggctcacacctgtaatcccagtactttgggaggccaaggtgggtggatcacttgaggtcaggagttcaagaccagcctagccaacgtggtaaaaccctgtctttactaaacatataaaaattagacaggtgtggtggtgtgtgacataatcccagctactcaggaggctgaggcaggagaattgcttgaacccgggggggcggaggttgcagtgagctgagagtgtgcctttgcactccagcctgggcaacagagtgagactccatctcaaaaaaaaaaaaagttgaatgttaggtggggtatggtggctaatgcctgtaatcccagcactttgagaggctgagctgagaggattgcttgaagccaggagttcaagactagcctggaaacaaagtgagacccctgtctctacaaaaaaaaaattcttttaattagccagggtggtggcatattcccatcatcccagctgcttaggctgaggcaggaggattgcctgagtccagaagttagaggatgcagtgagctatgatggcaccattgtgctccaactccagcctgggcaatggagtgagaccctgtctccaaaaaaaaaaaagggggaatgtaaagttgttttttaaagtaggtgagaaacaatgagacttgttaactcagttattctctcattttgttttttttttgagagctggggtgcagtggtgcagtcatggttcactgcaacttccacctcccaggcttaggtgatcctcctgccctagccacaggcacatgccaccatgcccagctaattttttctttttttaattacatctagatacggatctctctgtgttgcccaggctactctcaaactcctggatttaaatgatccacccacctcagcctcccaacatgctaggattatagcacgtttgaaattggcataataagcgtatctgcttcctaggattgtgatgagaactgaaaatatagttaaagttcaggaggctgggaagtccagtcaaagggctggcatctggtaagggccttgttgctgtgtcatgccatggccaaagatggaaggtcaagagagggctgaactcgcccttttataaggaacccacccctggaacagcactgtgtctccccaccccccaccttattggtattaatccattgatgagagccatgccctcatgacccaaacacctcccattgcccaactcccaacactgctgctttggggatcaagtttctaatacatgaactttgggggacatgcattcaaaccataataaagtgagaagagaaaggtgcccctcagtcttcagtcttctttagtttacaaatttaaataaatagacttactacattatagtccctaggtggttcttagtaagccttggcactgtgctataagtataaaaataatacgtaaagtctatctagtatttactttgttattaattccctagccctggtttgtttgctgtggtgttgttgtggtggtggtggtgaaagggtcttgctatgtcacccaggctggagtgcagtggcgtgtctcacagttcactgcagcttcaaacacctgggctcaagtgatcctccctcctcagcccctcaagaagctgggactacaggcatgcgccaccacacccagctaatttttgtgtttttatgttcatcatgttgcttaggctgatctcaaactccttggctcaagtgatctgcccacctcagcctcccagagtgctgggattacaggcgtgagccactgtgcccggctcatgttctcctacttctctggccatgtcatttcatgttgtttttgcagatttcccagatctcaatcttttgatctcctttctctctaactcaattcagtcttttctgtgcattaacatctcccaatgtttgtttccagtttgtaactctctcctgaatgtcagtcatctaattgttgaactcctattttctgtaaaccctgtcaagtcttcctaaccactgtagttggcacctccatccttctggtcgctcagctggaaactgtggacattttttttttaaagagatagatagggtcttgctgtcacccaggctggagtgcagtggcatgatcacagctcactgcagcctcaatctcctgggctcaggcaacccagttcagcctcccgaatagctgggactaccagtgcacaccactacacctggttaatttgtttttgttctgttttgttttgttgtagagataggggctcccagtgttgcccaggctggtctcaaactcctgaccctaagcgatcctcctgccttggcctcccaaagtgttttgattacaggcatgagccaccacacccagcctcaaggctcctttttgactgctgtttgtcacaaatcacatccaagttatcaaaacttgttggatccaactttagattgattgagaatccaaccactttcactgctgccccccagttcacccctgctgtctcttgcctagattattgtacatttcctcaaatgagtttcctcctgtctgcccttatgtccctgtagtatagtgtagtttaaatatatcagccagtgatattttcaaaatgtcaatcagattctcctcttgagtagaattctccagctgcttcccatctctgataaaggccaaagtctagatagaccagcaaggccctacccgatctgctccctctcactgctttttctctgacctcatctccttttattcagactgttcacaccaccataatcccctctgtttatcaagcttgccacgcatgttcctcagggattttgcacttgctgttccctctgcttggaatgttttatcagtctccagtgaggctatttccttaccacctcccggtctctgctcaaattccatcttttggcgaggcctccttaagcatcgcatatccaataatagctccctgcccacaagcattccctattctaccttttccgtttatttttctccaaagcacttttccatatatgacagactacacacacacatatatatgtttgtatatagggtcttgtttgtctctccccactagaaagaacagaagctccatgagggcagatactcatctgttttgctcagtgatgtatctccagggtagtgtctggtacacggtaggcactaaaaccttttttttcctagagagatatttaatttttttctctagagagacagagtcttgctattttgcccaggctggcctcaaactcctggcctcaattgagcctcctgcctcagcctcctgagtagctggaattataagtgtgagccactgtgcctggctccaactcaaagatttgacaaaaaatgaatgaacagtcgtatgtgtctgtggtttgaatggggcagaagatgagagtggctacccatgatggaccaagtggtatagtcacaaattagagcttcatatctaaatcctattttttcgaagtccttttctggttactcttatccatcctgattgttttaacccttattataccctagtgattctgcatagttagcacccagtttttctctcatgaattcatgagtattaatctttccccaaatacttgccaatttttttaggggaaatatcagcacatattttattggcataactcaataaaactacattggcataactcagtgacttaacaaaactcagagaatagagaaataaatgtaaaattaacatacagcagagagattatcccaaggactatgggattggattaaattaagaagattagagtgttgccagtgatggtcccactgtttaagagagtaaagtgcaaagaaggtgagtaaaattgcagggagcacagaacagcctggcacaggggagtccatcagtaagctgtctagaacgagggtggataagtggaaatgcctttcaggaccatctgtatctctgtcctaacttcatgctcattatgcaacagactaatgtttcccaggtactttagtattagagggcttgtcctatgtcatgttgtggttaaatactctggcagtcagtgttgcaccagtccaccttggggaatatctttgggtttcctgtaaggtctaagggggcagagacaagactatagtaaacacttcctaatgattcccctctacctagtctcttattcaaaatgtagcccaatgatatctttctcagacgtgctcatctacagtgaaacaagtacaaaagggctatgccaataaaacttgaaaggcaaattgcagtgtattattccatacatgagtagtgttatcacacctgacaagaattattcattgtttttcaaatatgagtatagaaattctgaatgaaacatccttttttaataattactatttttttatttttgtagagacagggtctcactatgttgcccaggctggtctcgaactcctggactccagggaacctcctgcctcagcctccgaaaatgctaggattacaggtgtgagccaccacgcctggcccaagttttattaataggaagatatgtgtctctactgcaaacagtagagctgttatatgaggaacatagatttgaaaagtttcccccgttctaacccagatgccttttccacctgatcttggagaaattaagaccacgtaagccctcattttaaagagaagtaagcagatcttggctggtacggtggtgtgcaccggtagtctcagctactcaggaggctgaggtgggaggatggcttgatcccaggagtttgaggctacagtgggttatgatcataccactgcactccagcctggtaacagagtgaggcccttacaaaaaacaggccctttggggaaaaaaaaaaaaaaggctggatgtggtggctcacgcctataattcccagcactttgggaggccaaggtgggtggatcacttgaggtcaggtgtttgtgaccagcctggccaacatggtgaaactgtctgtactaaaaatacaaaaattagccaggcgtggtagaacaaacctgtagtcccaactcctcgggaggctgaggaaggagagtcgcttgagcctgggaggtggaggttgcagtgagccgagatcacgccactgcattccagcctggtgacagagtgagactgtctcaaataaataaataaataaataaataaattttaaaaagttaggtaagcaggtctagagagttgtggcacagctaaatagtcatagaactgggactagaattctcttttgaggccttagaatttggtcacgctgcagtatatcctgcatctcaaaagctttgtcttctgagggtgaatttgttgaaaaccaccaagaggatctcaggccaaataaggtagatgaccagatttgataatctgctattagtccaaaatgaactggctttaacaagaatgttttccttgagaattgtagtgaatgaatagcctattaaatgcatcgcaaaaactagatccccctaaaagacaacagggaatgatagactatcccatttgattcatctcatatatacacagcagtctcagagttgcagtgccagtaccaccactactaattatgatcacttagacataattactaattatgattgctactatgaaacttatgaaaaaagtttaaaatttttaaattgaagatgcttttctcatcctgccccctccttttttggtgtactacatcttcatgttcactgttgggccatatagccattacatattgaattctccctgaaagtcttctttagaattgatttgctaagtagctctgtgtttagtgctttgctccagttcttacaccagtgtttctggttgttttggtctgaagcttgttctctagttctagatatggcaaatttttttttgaagaaggctacatattaaatatttaggctctgtgggccaaaaatggtcctgttaatgtattcgtgagtgtgtgtgtacttaacaacacattttttaaatgtaaaagccattcttagcttgttgggtgtggtggctcatgcctgtaatcccagcactgagatggctgagatgggaggattgcttgagctcaggagtttgagaccagcctgggcaacacagtgaagactccatttcaaaaaaaaaaaaaaaaaaaaaaaagccattcttagcttgaggactgccaatccttgctttagtagattcctcataaggggctcatggagacaatattccagttttgctggatataaaatccttggcttacactttatgtattttaaatatgttacttcattttcttctcacataaaacattgcagttgaagtctgatgacaatctgattttttttttactagaccacttggtgttggtcattctgggttgatactctcaagtttgcaatgtctttttttcaatatctactttttaagtatttttttttaagttttcttgatttcttttgttccctttcgttggtcttcatctataagaactgctattactcatattttgggtctttgctcatttttagtatttgtcactttctcccttttatttttttttaaaaaaagcaatccttaggtttgactctgatctttttctcatttctttttaatttttattgctaattctttttggtgtctaatttctgaattttctaattctgatttaggttattctttcatgtcttgtatctttttgttttgttttgttttgagatggagtatcgctctattgccaggctggagtggaatggcgccatctcggcttcctgcaacctcctcctcccgagttcaagcgattctcctgcctcaccctcgcgagtagctgggattacaggcgcccaacaccatgcctggctaatttttgcctttttagtagagacggggctttgctacgtaggccaggctgatgttgaactcctgacctcaggtgatccgcccgcctcagcctcccaaagtgctgggattacaggcatgagccaccgcgtccggcctcttgtatcattttcttttttttttttttttgagacggagtctcggtctgtcgcccaggctggagtgcagtggcgcgatctcggctcactgcaagctccgcctcccgggagcctcctgcctcagcctccgaagcagctgggactacaggcgcccgccaccatgcccagctaattttttttttttttgtattttttagtagagacggggtttcactgtgttagccaagatggtctcgatcttctgacctcatgatgcgcccgcctcggcctcccaaagtgctgggattacaggcttgagacaccgcgcccagccttgtatcattttcttaaagacttagctcactctgcaataggatgcagtttgatttgcttcctgggcacatttctggcatgctttcactgtctgatattgttctattctttattctcttcatgtgaaattgatttttctaaatttttagaaggaagtgtggttcaggattgcttttctgatttcacgtactcctcaaacgtttgactcccattggacatccttccttctgcacattcatttttgcatggtagttttttcatataaccaccctaaaactcagcttggcaaagataaaatgtcatcaaaaggaatgtagggcagtcctattgaaactgagctctacatcaagcccagagcctgacaggtgtcaaacgtcactgtttatttcacatttaaaatataaaatataccatggtgtccctgtgagtttgctgtggttccctgggacacgttagctcacaatttggggatcacaatcccaggtgatgctgatattgctgatcaggagaccacacttggatgtttggctgttttttgtttgttttccccaaaaaacctacaggaagtaaaaaaaaaaagtacaagaagaaagactttcaaaacttgtactgccagccatgaagaaaatttcttcctttggacccatgtactcatgtatttatcaattaaaatgaaattattgaaatcagtttggaaacagttgtatatgtgtgtatttgtgggagagcatgcttgcttgcagatgcacacacacctgctatgtttgttgggaaaattagtatgtgttcatttgctgtagtctagctttcttactggagggaaaaactactttgagtagacaggaaggaacaaaaaaagcatgcttgcatcctcattgaccttaatgttcaaggacatttggtggtaaataattgaatttcctttgtaacctgccacagtgaatttgattgactgctagtttgagatgtgattgataagcctgccaaattttataaagaaaactttatataatgtttacatttataaaatgtttatgttttataaagaaaactttgtatctctcaagagagggaaatccagattgcctggtaccagcatttatcatacagagaatcttggatgttactcccagtaaaatgtgcccctaatttatactataatgaaaataaaacatagttgacctctaaaagagcaatcaactgctttcaagtgaactgccacataatgctaattagttgaagattatgctctgttctccttaatgaattataaaaagcaaaacactaaaaattaactcgggaagacaaagtaactggtgcttcctgcatttttccttgttctttgtctttctaggatcccaggaaatgtgggcaactcatgagaaggtagtgccctggatggaagttagctgaacaaaatcagcttactctaagcccttctggcctcagccccttttctggattttaagaaatccagcaattgatacaagattatagagtataccactcagtgaagttcagagttctactacagaaagcccaagccttgatttacacttaacatctaggagaaatgggaaagaatctagccaatttactttccccaacagagggatctgtatagatgagatgaccagcgtagcaagcagcctgctattacctaatctctcacccaggattaacattaacatgggctttctaacatttcactttttacaaactagtctttaagatcttttttttttttttttttttttgagtctcgctgtgtcacccaggctggagctcaatagagtcacctcagctcactgcaaccaccatctccctggttcaagcaattcgcctgcctcagcctcctgagtagctgggattacaggcgcacaccaccacacccggctaattttttatgtttttggtagaggcagggtttctccatgttggccaggctggtctcgaactcctgacctcaagtgatccacctgcctcagcctcccaaagtactgggattacaggtgtgagccaccatgcccagcctagtcttgaggttcttaagatatatagaaaaaggaatgtagattttgttaagccttgctctttttttaagactggttttataaattacaaagacaaatcctaggttagaagaggccatcaagatcaaagtatttcttccttaaaaggatgagttttcattgttaatcagaggctagttttaacggtagtacttaaattaactgtcctagtagaaagctggaacctggaaactcctttattctgcctctgtagaaatggctttatacgccgggcgtggtggctcatgcttgtaatcccagcactttgggaggccgaggcgggcagatcacctgaggtcgggagttccagactagcctgaccaacatggggaaaccccatctctactgaaaatacaaaattagcagcgggtagaggtgcatgcctgtaatcccagctacttgggaggctgaggcaggagaattgcttgaacctgggggtggaggttgcggtgagccgagattgtgccattgcactccagcctgggcaacaagagtgaaactccatctcaaaaaaaaaaaaaaagaaaaaagaaatggctttatacactattatggcaacaattgagctcctggtttcggtggacagtaaatgtttatcttacagttgtgctgggcgagaagtcaggaaaaggagctgagtgtgtaactgtgatttccttttccgtagtgtgttccatgggaaccggtacaagcagactctatagtgctctcgccaagacactgaacagcagcgctgcctcccagcacccagagtatttggtgtcacctgacccagagcatctggagcccattgatcctaaagagcttcttgaggaatgcagggccgtcctgcacacccgacctccccggttccagagggattttgtggatctgaggacagattgccctagtacccacccacctatcagggttatgcaatggaacatcctcgcccaaggtatgctggatgcttttgtgcctctgcagtcaagtttgctgtgactgcctttctgcttctgcacatccacagtgcactgttttatgtggaaggaagaggtgtgggcagatggaggtgactgcagcagcatggagagctcctagaagaggttaagacagggaatcatctggttttcactttttttttttttttagaaagaaaaaagacactttaattgttcttggatagtctacaaacatggaaggtgtaaagaataaaccacgagttacttgctttaattgtaaaaaccaagtcaggtgcagtggctcacacctgtaatcccagcactttgggaggccgaggtgggtggatcacctgtggtcaggagttcgagaccagcctgaccaacatggagaaaccccgtttctactaaaaatacaaaattagccgggtgtggtggcgcatgcctgtaatcccagctactcgggaggctgaggcaggagaatcgcttgaacccagaaagtggtggttgcagtgagctgagattgcgccattgcactgcagcctgggcaacaagatcgaggttgcagtgagctgagattgagccactgcactccagcctgggcaacagagtgagacactgtctcaaaaaaatatgtatatatatatatatatatatatatacactttgttacagtagtaaggacttctttcctgggtctgccaaattaaaaaacagatgtgtcaatcaactctatgtagcattgccttttatgtaagcagttgagattttaagaaaaacaagggcctgattttttttttttcctggaaaataaggggagattccgtgacttaccaatctttgattctttttccctaagtaggaaaagctgcctatttaaaataagttccattcattctgagtagtgtccataatagtcagggttaaaactaatacttggtgttaaatatttggtgtttaaaaaaaccaaaaaaattttaaaagaaaattggcatttatttcattttatatagcttagatccctggcactgcaaagcagtttccttaagtaagatcttaatatcctggaatatagttaacatgaaatcatttcgaaacaaaagatctgttgtttgcttcatccacatagtgagaggtgatttagtttggatggggtaatacagtttggacagagagccactccaagcatttaaagcagaggaagcattctgagggtcttgagtgatgctaaacctcctgggtactttgaagtcacggttttgtaagagctgacaactgactagctttttcttttcagctcttggagaaggcaaagacaactttgtacagtgccctgttgaagcactcaaatgggaagaaaggaaatgtctcatcctggaagaaatcctggcctaccagcctgatatattgtgcctccaagaggtggaccactattttgacaccttccagccactcctcagtagactaggctatcaaggcacgtttttccccaaaccctggtcaccttgtctagatgtagaacacaacaatggaccagatggttgtgccttattttttcttcaaaaccgattcaagctagtcaacagtgccaatattaggctgacagccatgacattgaaaaccaaccaggtggccattgcacagaccctggagtgcaaggagtcaggccgacagttctgcatcgctgttacccatctaaaagcacgcactggctgggagcggtttcgatcagctcaaggctgtgacctccttcagaacctgcaaaacatcacccaaggagccaagattccccttattgtgtgtggggacttcaatgcagagccaacagaagaggtctacaaacactttgcttcctccagcctcaacctgaacagcgcctacaagctgctgagtgctgatgggcagtcagaacccccatacactacctggaagatccggacctcaggggagtgcaggcacaccctggattacatctggtattctaaacatgctctaaatgtaaggtcagctctcgatctgctcactgaagaacagattggacccaacaggttaccttccttcaattatccttcagaccacctgtctctagtgtgtgacttcagctttactgaggaatctgatggactttcataaatacttgcttttgtctttttaatcacaggagtctatttttttttttttttttttttttttttgagacagagtctcgctctgttgcctaggctggagtacagtggcctgatctcggctcactgcaagatccgcctcccgggttcatggcattctcctgcctcagcctccagagcaactgggacaacaggcgcccgtcaccacgcccagctaattttttgtatttttagtagagacggggtttcaccgtgttagccaggatggtctcgatctcctgaccttgaatcacaagagtcttaacagggaatgtttcaggaaacaaataggataagacaatgccagaggaaggatagaaacatgggaagtttctatcatttcattttctgcgtttccagcatgcccttggaaaagactccctttagtccctttttcaattaaaacctatggtgaaaaaggcgtttgcactccaattttggcttgtgttgttttcttttccttaatattacattttgatcatttaagggcattaaattggcttgttttggtcaggtgtggtggctgctcatgcctgtaataccaacacattgggaggccaaggtgggagaatcacttgaacccaggagttcgagtccagcctgggcaacatggcacgagaccccatctctatttctaaaataataataaattcggttattttgaagctttttcaatttgaggatgctataaaaacttagacttgttgcttgaatcttccataatagtatgtaggagcaatttctctaaacagcattttaagttatttatttgtgggtttttaaaatgtcaacaaaatgcatggcagtatttattttttatatcttcatataaaattaagtaaattatagcattatgaacattttagaaccatgcaagagaagttatagagaaagtaatttatggtgattttcataaagctttaaaatattttcatttgggctataacaaaatgagtacaaaggaactatttagcctggaggggcttttgttatttaaatgtcagatttctttgatacattcttcaaaaataatccttgtcctgcctctatgttccattattgtgtttcttttttttttttttggagacagagtctcactctgttgcccaggctggagtgcagtggtgtagtctcggctcactgcaagctctgcctcccaggttcacaccattctcctgcctcagcctcccaagtagctgggactacaggcgcctgccaccacgcccggctaattttttgtatttttagtagagacggggtttcaccatgttagtcaggatggtctcagtctcgatctcctgacctggtgatctgcccgccttggcctcccaaagtgctgggattacaggcgtgagccacagcgcccggccttattgtgtttcttgaagagattccaattagttttcaattatttaaccaattagttttcattattgctgttatatttaaactttaccattggaataatattggtatgcgtttgatattagtcactcgatgtcatcattatttgtattggaatgtgctattcacaataggttatttagaagctgtatgtggcagtggccaagagagtcagtaggaccttcttttcagagataggaaactttctagaaagcctgttaatgggctttcattgaaatttcctaagatagccagatactgtcattcaaaatatctagaaagaagaatgtaaaaagttagataacgtgggtcgggtgtggtggctcatgcttgtaatcccagcactttcggaggccaaggtgggcggatcaactgtggtcaggagttcgaaaccagcctggccaacatggtgaaacctcgtctctactaaaaatacaaaaattagctgggcatggtggcaggtgtctgtaatcccagctacttgggaggctgaaacaggagaatcgcttgaacctgggaggtagaggttgcagtgaacccagactgcaccattgcgctctagcctgggcaacaagagtgaaactccatctcaaaaaaacctggaattctcttccatcagaaataaaagtaaaaattacaggtaaagcctcttccaaacaaaataacttattggtaatagatattttaatttgtgagttgtaaatacataagattaataaatggtcttttaaacctagtgcttttaatgtctttgtagtccaaaaagaatctgggagtagattttctcctttaatactgttttatcataatgacccacatatatccattcacacatggagccttcactgtaaaagtgaacgtacatagatctgtagctgcaacaacgtccactgaaatggatcactcattctttaatagaaccacttttaaaacaaatgaggttttcagaagtaacatagtatgcacagaattttggggctactggaaagaatgacaagcacgggaacatctaccaaatgtagaattggttcagattttagcatgactaattgctagtcatatgttgttgagaacaatactgattagaatactcattattgcaggtacattgtttacctaccccaaaatacttcaaccggaagagaaaccatggcagccttaaataaataaatctggataagaatgaaggccaaaataatgtctgagtttcaagtgttgtctaccaacaaaattaacagggtatgagttgagggtgggcatatgggtgcatgggcatgccaccagacgaaatcagttttggaaacaccaacatatgattggtatgttactatgagttaaggggactggaaaaaatccagtgaaactctcgagttatcctttctagttatcactgcaggagattggatccttcactgatgcattatcaggaactgaaaaagaaaatttttttaaagtcatatgtgagccttctaataattttttagtagtatataaatcttaataggttgcttttttcttttcttttgagatacggtattgctctgtcacccaggctgcagtgcagtggtgtgatcatggctcactgtagtctaccccacgggctccagtgatcctcccacctcagtctcccgagctgctgggaccacaggcacgtgaaaccatgcccagctaaaattttttacttttttgtagagatggggtttcatcacattgcccaggctggtcccaaactcctgggttcaagtgatcctcctacctccacctcccaaagtgctgggattacagccatgagccactgtgccccaccctaagttgcatgttccttgcatagatcccttattccatccatatgtacctttcattctgcttttcctattataccctatatactattgtttctggtttttatttttctattttcccatacactgttttgtcagagtctcagaaggtaaattgcaaatttgaagagggagtaggaatggcatgagttttggtttccttcatgccacatttcagtagataccgtagtacatggtggtagtaacgactgactggattgtttatttaaataaggcattatggtgtatacatatgatgaaattaacatttgagttcctttgactccaagagctttacatacgatcttaaaactaaactatagacgggggctcaaaaggtcaaataatttgagcaaagtgatagcaaataaatagtagctgagtcaggattcaaactcaggtctgtctggattccaaagtgcttgcttcttccccaccaccatttctttggctttgagtgaacacaaacggggagaatagacattgcagtgtagcaagagatttgttaaacatggtcaaatggtcaaacatgtaagtcaaatacacatgaactatcatacatacagtgttagactagaagcaggatatggtggctgaatactggaatataatggatttccagtgggttttttttttttttttttttttttaagatggagtctcactctgttgcctgggctggagtgcagaggtgcgatctcagctcactgcgacctccgcctcccaggttcaagtgattctcctgcctcagcctccctagtagctggaattacaggcgtgagccaccacacccggcctggatttccagttttctgatacagtaaagtctagttttgcccaaagtagaacatttgatactgtttgtgtacttcaatcgtagtttttaaaggaagcaataagaacagctactctagtatttcaaattaaaggaaaaaactgatgcaaatattctgtattcaaaccattttttaaaacagtcaagatttataatgaagggaatgttgcatatagttacatatatatgcattatttatcatgtgtgttagacttgaaagattcccaagaattaaattctaaaaagagagaaaactaaaacatgatttcagttttaaaaaaggaaagacatccaagaaatgaatgtgcatgcataaggagctctaatcaactctttctttaaaatgacatgtataaaaatataggacaggcagactttttacctggagtggatagatattagcaagagatttgtgagccatggtcaaacaccagaatggcaaaggcctggaactagggcatgtacaataaggggagaggaaaaaagcaacatgtcaaagggcacaggctgtaactgaaaagacttagctgtcaccagtgtgaccctgaacgagtagagcctaagttttctcatccatagagtatatctgccctctcaacctcatagatttgtgagatctgtaaaataatataaattttaaaatacatattgtaagtcacacaataataatggctaagtttcaaaacaaaaaagggaagggccctctgtatttcatgtcgtaacaacccactcctaattttttcaccaaagagaataacccttcaatttgaaagggcagaactaagtgtttatagaaatttaagcccaaaataggcagaagggctgactgaagggcaaaagattggttggttggtcttttctacccagttgttcctctaggcagatgtgaggttgtgggctagtgcttaggttcttcaatttcgagaggttgtcagttgtactttgatttgtaatgtagaaagatctgcctttgaatgacaaaacagaatacccacaactccagccccttgttcccatatttctttggaaaactcaattctgggaaaacattcatgtaagattagtcacacagacagcaaaacctttcttgacagaatgctaggcaaagctttgcgtctcctaagcatctggtaaacttggactgtatgaatctcaactggttaatttatctttattggctgccaatatattcaaagccagtatatagctgcattttaatgactgtgtaacactttacagcatatattctattagttttcttttgttaatttatttaaaattccttttttcttcactgaaatttcttgtacctgtttttgttgacttccatttattctttttttttttttttttttgagacggagtctcgctctgtcgcccgggctggactgcagtggcgcgatcttggctcactgcaagctcctcctcccgggttcacgccattctcctgcctcagcctcccgagtagctgggactacaggcgccagccaccacgcccggctaatttttttgtatttttagtagagacgggggtttcaccgtgttagccaggatggtcttgatctcctgaccacgtgatctgcccgcctcggcctcccaaagtgctgggattacaggcttgagctgagctaccgcgcccggctttttttttttttttttttttttttgagacggagttttgcttttgttgccgaggctggagtgcaatggcgcaattccggctcaccgcaacctccgcctcccaggttcaagcaattctcctgcctcagcctcccgagtagctgggattgcaggcatgcgccaccatgcctggctaatttttttgctgtttttagtagagacggnnnnnnnnnnnnnnnnnnnnnnnnnnnnnnnnnnnnnnnnnnnnnnnnnnnnnnnnnnnnnnnnnnnnnnnnnnnnnnnnnnnnnnnnnnnnnnnnnnnnnnnnnnnnnnnnnnnnnnnnnnnnnnnnnnnnnnnnnnnnnnnnnnnnnnnnnnnnnnnnnnnnnnnnnnnnnnnnnnnnnnnnnnnnnnnnnnnnnnnnnnnnnnntaaaaacacaaaaattagccaggcatgttggcaggcgcctaatcctagctattccaggggatgagatgggagtattattgcttgaacctgggaggcacaggttgcagtgagctgagatcgtgccactacattccagcctggatgacagagctagactgtctccaaaaaaaaaaaaggaagatggtggaagactgcacataaggaacatgtatgtctgacatctgattctggtttccacagactggtaaacctgcagagaacacccagcaaaattctgcaatattttaaaattcagtttgtgggaaacttgtttccctccctgcaacccccacccccacttgtttttggatgggagtgaatgggggttcaggctaaaactcaactgggagtcagagggcgagttctttgcagttctgccactgactatctgaaccaactgatgcgtcaaaagttttcctgaaccttaggttcttcatttgtaataaaggaataatctctaaggtttcttaaaattctgatttgaattttaaaactctgagttactgctgccactgcccaaaaatatttgggaaactttttggaactgcttccatatgtttgatgaagctcttaagaaaacttgtgtcaatctcatagccacatctccatttgaaccaagtacgacattacctagcttgattcacatcacattaacttcaaatgacacagctctttttaaaactaaaatcttcaacaggaaatttgtctctgttaaatatatgtaaaatttagattctcctctaaaaagccatttaaaagtattttgaatggtaacattattagaattagcatatagctttccagagtaatttctttgaagagacaaggcacattaacttggtgtactgtttcataagactcttacaaagtcatcctaattaaagacatgttaaatataagaaaaaggctttagaatcgataaaatacacagtatgtaggttttaaaaaagctatttgtaatactatatctcaaactacctttttccatttttggaacacttgggttggaacacagaaccctaaatgttaacgctttctttattgtaactataaggcagtggttctaaaatgttgctgcacaatgaaatcacctagagatattttaaaaataaagatgcctggctccctttcccaaacactgacttaattggtatggagtaggagctaagacacaggcttatgaaaagcttcccagctatttctaatgtgaggcaaagtaaccacgggattcaagtgaattaatgtcctacaattcagaaataatttacagattatatagattagtatttttcctttttgggcagtgacagtatcacttacctgaaatagacaagtttctcaaagttaagacagtgcaggccgggtgtgatggctcacgcctataatgccagcactttgggaagctgaggcaggtggatcacctgagatcaggagtttgagaccagcctggccaacatggtgaaaccccgtctctactgaaaatataaaaaattagccaggcgtggttgtgcatgcctgtaatcccagctactcaggaggctgaagcaggagaatcatttgaacccaggaggcggaggttgcagtgagccaagatggcgccagtgcactccagcctgggtgacagagagagactctgtctcaaaaaataaagattctacagtgcaatggatgtgaacaattatcttgggagaaagttaactctgctgttagtttacagcctatttataattcacagctttgttttgtctttgatatgcagtattttgcattaagcaattatggttttttgggttttttttgagacagagtctcgctctgtcgcccaggctggagtgcagtgacgccatctcggctcattgcaacctctgtctctcaggttcaagtaattctcctgcctcagcctcctgagtagctgggattataggcatgcgccaccacaccctgctaattttttgtatttttagtagagatgggctttcactgtgttagccaggatggtctcaatctcctgaactcatgatccacccgccttggcctgccaaagtgctgggattacaggcatgagccacacgcatggccaagcaatgttttacttgtattatattttccctttggaagctgtgatgtattgttttttagtcttgaacccaaagcattactactgagttgcagtgttcagaaagatagttatgggtgctcaaataagtctccctgctgcacgtgagtgtttcaaaggtttggaggtgtgacacagataggaggcaaatcagtgcccttgtaaagggtgagcagtatcttattctaccattagggctggcatcacagtgtactgagttcctacagagtatgttttaattatgggggacagtgattgtaacaaaggggctgaagactagatgaatcacaaccactgaagacttgcagtactttgaatggttaaaagctacaataaaagggaaagttgctttgatagctgtggaactaaagggttactcttgcctgccaaaaataaagtgctctgtagtaccctcataaaagtaggataggagacttaaaagcaaaaggatcataagagaccttataaataactccaaggccaaaattttctttagtttgtcttagtaattacacatgacttgttaatgtgatcagaaatgtacactcctgcgtgtatgcggtgtcagacaggccactaagtaatgtaccaagtgccccatcccttacattctggcttcaccaccacacctcactggaactgccctctcattgtcagtgttaagctcagtggctttttctttagcctgatttgctttgcctttctccacttgatgttgccaccatatcctgaaatgttaccttatctgtcctgtttattctctatgaatagtccttgacatccgttgctgattctttttcttctcccccaacctatctttatatactttactctttctactctttaagttctgagctaactcacagatcactccccaacctgaatggtttccacacctatttcagaaacttttattttgatgtctgtcacctcatatctcagtaaataaaactgaactccaatgtaggtgaaggaggaacgagttgtccagaaagaagccatcaatggatgactcatgaggtatgaatgcctagaatatttgggaaaaaatgaaatatagcccaagtaagtctaaaagaggagtagcaagagaatgaggcttggggagacaggaggagcccagatcaaaggactttaattgctatgcttaggcatatctttttagcaagagatgccattgaagaatctgaagcaatcacaaaggttcatgagtgatgaaagctgcatttagaaagctctcaactggtagcctggagaatggattagagagagacttggtgagacaaagacagggaggatggaaaagaaagtatttagaaggtactatgagtagaaatttggttaatgattagaggaggtaaagtatctaggatggcccccaggttgcttctagtatgagtaatgggttgctggtattatttattgggctaagagaaacagattttggagggaagagagctcaaatggatactcaggaagaaacagccagtggcaattagataaacccacctaagatacagtagtgcctgcttcagcagcacatatcctaatactggaacgatacacagattaacacagcccctgcacaaggatgacacgcaatttcatgaagcattccaacagagaaaaaaaatgacagcataaaagtctaggctttaacaatagatttggtagtaaaaaccataggcatgggtgagattatctaacaattatgttagtgaaataatagtaaacgtctaataagagtgttttctatgtgccagacactagttacaaatccttaatatattaactcatttaatcctgacaacaattctatgaggaaaagaagaaagaagcccataggcagaaagaacaaagaaaaaacaagttggttaggcaggaagtaaacatgggaaaccaagtaagttttgagaagtaggccatgagattaagtgaaccaaagtgtccgtttaatttgac

SEQ ID NO: 788 - DNA, 1769 bp, Homo sapiens
ccgacgcagcggtgttgcacctccctctccggctctgctgcccgggatttccccagaacctgcgccgcgcgagaaggagcctgggagcatccgcccacactgcccggacagtcggctcgactcggtgctctcggccccagccgggctccgctcctcgggcgcgcgaggggccgtggtggcggcggcgcccggcatgtttcatagtccgcggcggctctgctcggccctgctgcagagggacgcgcccggcctgcgccgcctgcccgccccagggatgcgccgcccgttgtccccgccggctgctgttcccaggcccgcatccccccggctgctggcggcggcctcggcggcctcgggcgccgcgaggtcgtgttcccgaacagtgtgttccatgggaaccggtacaagcagactctatagtgctctcgccaagacactgaacagcagcgctgcctcccagcacccagagtatttggtgtcacctgacccagagcatctggagcccattgatcctaaagagcttcttgaggaatgcagggccgtcctgcacacccgacctccccggttccagagggattttgtggatctgaggacagattgccctagtacccacccacctatcagggttatgcaatggaacatcctcgcccaagctcttggagaaggcaaagacaactttgtacagtgccctgttgaagcactcaaatgggaagaaaggaaatgtctcatcctggaagaaatcctggcctaccagcctgatatattgtgcctccaagaggtggaccactattttgacaccttccagccactcctcagtagactaggctatcaaggcacgtttttccccaaaccctggtcaccttgtctagatgtagaacacaacaatggaccagatggttgtgccttattttttcttcaaaaccgattcaagctagtcaacagtgccaatattaggctgacagccatgacattgaaaaccaaccaggtggccattgcacagaccctggagtgcaaggagtcaggccgacagttctgcatcgctgttacccatctaaaagcacgcactggctgggagcggtttcgatcagctcaaggctgtgacctccttcagaacctgcaaaacatcacccaaggagccaagattccccttattgtgtgtggggacttcaatgcagagccaacagaagaggtctacaaacactttgcttcctccagcctcaacctgaacagcgcctacaagctgctgagtgctgatgggcagtcagaacccccatacactacctggaagatccggacctcaggggagtgcaggcacaccctggattacatctggtattctaaacatgctctaaatgtaaggtcagctctcgatctgctcactgaagaacagattggacccaacaggttaccttccttcaattatccttcagaccacctgtctctagtgtgtgacttcagctttactgaggaatctgatggactttcataaatacttgcttttgtctttttaatcacaggagtctatttttttttttttttttttttttttttgagacagagtctcgctctgttgcctaggctggagtacagtggcctgatctcggctcactgcaagatccgcctcccgggttcatggcattctcctgcctcagcctccagagcaactgggacaacaggcgcccgtcaccacgcccagctaattttttgtatttttagtagagacggggtttcaccgtgttagccaggatggtctcgatctcctgaccttg

SEQ ID NO: 789 - protein, 421 aa, Homo sapiens
MFHSPRRLCSALLQRDAPGLRRLPAPGMRRPLSPPAAVPRPDRLLAAASAASGAARSCSRTVCSMGTGTSRKAKTLNSSAASQHPEYLVSPDPEHLEPIDPKELLEECRAVLHWPRFQRDFVDLRTDCPSTHPPIRVMQWNILAQALGEGKDNFVQCPVEALKWEERKCLIEILAYQPDILCLQEVDHYFDTFQPLLSRLGYQGTFFPKPWSPCLDVEHNNGPDGCALFFLQNRFKLVNSANIRLTAMTLKTNQVAIAQTLECKESGRQFCIAVTHLKARTGWERFRSAQGCDLLQNLQNITQGAKIPLIVCGDFNAEPTEEVYKHFASSSLNLNSAYKLLSADGQSEPPYTTWKIRTSGECRHTLDYIWYSKHALNVRSALDLLTEEQIGPNRLPSFNYPSDHLSLVCDFSFTEESDGLS

SEQ ID NO: 790 - DNA, 110799 bp, Mus musculus
  misc_feature (1)...(110799): n = A,T,C or G
tgactttaagaaagaacattttgttacgtccttatcttttggcctcctgttggtgagaatcatgttaggcagtgaaattaagaacatgaaggcccagatgacaacagaaagaatctttgcacccaagagattgctggggctggacgttttaaatggcctggtggtcttcaggtagcggtcaatggttatcaaccccaggaacgatatactgatatacattgtaaaataaaatgtgactgaagtaacttggcacaccaaggttctcagaggcccggctcccagtttagcatcactaagaattttaaatggaaaagttagaatcattagtagatcagagatgaccgtgttcttaagaaaaatgatgaagttggatttactgcggatctgaaagaaaatcctcattgccaagctgttcgtgatgagcccagcaaagaacaggacggtgtacagcaatgggaagagaacctgggtgatcttgtagtctctgacgcacagggtgctggtcccaggggagaaggtggtattggctgaggtggtgttgacaccaggcacatccatggtcctgtagtagaaagaaagagagagagggagggtgatcacaggtcattggtttggttgttatcttcatacatacattttagaattacagcgttgcttaaaacttgagttttttttatctttactgtggcagttagtaggggtgaatagacaaccgaatccctgaatatctcatctacacaagaattccatctctagcaacttaaaacgaggtggtgtgttgtgagatgtcatgagagctttgtgcttgttttggttgaaggctgtattttacaacactgtggtcttggtgtcagcacccctgtgttaatttcgaaaagcctaatgacaggcactctagtgatgctttgcctatttcccctgcatcttcttttacatggccgagtagccttttgtgtctgtttacagctgcctttccttctctgcccatattcctggtttcactctttagtatcattgatgaattcaatagaggagtgattaattatgagttggaatcataaatggagaatttcaaagagattggtataaaatcacttctgggaaatgaattcatatattaaatagtaaatagtagaaaataataatccaaaaaattttcctttgcattgagaaatatctttgcctgtgttcagtcatgcaataaaatattagcctcacagagactcatgatttagagtgcttttagcccatgcatttctcattttcagctcattcattatatttgaagtttgtatatgtttttgaatatcattcagagtgaatcctaaaatggtaataatgatgatgcaggcaatagattctctatctgtgatcattacttgatatttctcaaggcagccagagcatcattcctggcatatttaatggtagctaaaataaaatagcagaatcggatccttatctgatatcctagattatcacacaacagacgggggaaggaataggagcagttgacttggctgtcttgtatctaacttgaaatttaagatgaaatttaaaacttttcaaatttccatcaaataaataaaatgatttttcataaaatgggattcctcatattcaaatatacagtttgaaaaccccacaaaactctcatgggagatttaacgtgataactgaagatagcacatacttccctctaatgtcaatgggatcctttaattactgaaaacgatacagttaagaataataccagaagtatgagctcagtcctcagcccctcatccaacacctcagagtgactgagttcaccactgagttcaaacctctttgcaattgttagttccttttaattactcatttcctggatagttctgaccactctaccttaagaatgctccttgtgtagagtaggcaaatcatttaacaatgttcttgactttgggagtttccactcctttcatctatttttaattctcattttagggtcaaagcatcaatatttctccatgcttagcatattttcattgaagaatttcgtctcccacaccactgagacttatatcttggtttaattaacttaatgccattccaaacatatgcttctggttttattaattgctatataaggctttcaatttcaagaacaaacttgagtgtatataatatatatatgtatataacatattttttcagaatataagtagatttctgttaaatgctaatataacaacattacctggttctgctgaatctgaaggatatgagtgtctccgggaatactagttagtggaacttgcagactggcatctgttgctttcttctcagtgacttgcataagttcccaaagccctctgtgatagagactctgcagagacttcagcaaggcagccttgagtgttctagagaaagagaaaggaagaagggaagaaagcacaccttccatgcaggctcagagcagtgcagactccgtgtctgtctgcagagaggggaggaaaacagcccccagtagaagattgtttaccttctgtgaatattcagagctctgcagactccagtctgtctgtttttaggacttctccttttattctgtagaaaacattgaggcgaaggtggctgagaagttgtcttttaaaaagcaatttaagatattgtgggtttttgtttttataaattttttttctaaaacttgaaatagtatcattaaagtagaggggttttgtttgtttgtttggttggttggttggttggtttggctattttccataaatgataaatccaagttgagaggatgtcttctaaatgtgttcctggagaatgctgcaggctcgctttcgcagatgactgttcacctgaaagcatactatgctcaaagtggacgatgtgtcactgtctgacaagtaattgtatcatctcaaaatatgtgctcccatggggggagggtaagccttctgcttctcgttttatcctagttcataatttcattatttgcaatctgggtttgattattgtctttgtgggtaaaacaacaccatcatcccattataaattattagttccccaaattacattagggaaaaaacagttgtatacagtgccaggctgattgtgtgaagcggccttcatggtttccgtgaacagaacttaggtaacagacagtgtttctttatgaattgagtttactgttaaagataatattgaattaatcagcttggtaactattacatgcagtttttaacttttaaacgaaaaaggcaagatacacttggagtgaaattgtaggttaagtttgttactgctgtatatttgcgtaactatttctggctcccgcgatggagaaaaggcacaagcacagtatttccaactgaaatggccgttagctataaaaccacatgaggaggtgctgctacttggaacatatattccatatattctgaattttgagtgtgtttatacctattaaatcaatttaatgatgtatcatggaagctcagcatcacttgaacatttttttaaaaacatgcttaggggccactgcctagtttctgtgaaccagaaacccccatttgtgtttaacctcccttctatgtgatgcctaggcacagtaaagagtgctgaccacttgattaaatggacattggacttttattgtcactaaaatttgagggcaagctattgatctcattcactttagcaacattcaaatacatagtaggtgcaatattttttacctagaaagaagtattggtttgattttaaacttttcagaaagtttatatgggctgctttacctttgtacataaacagtcaattaaacttgtcttatttgttggtttggatatttgagatactttttaaaaaataatttacttttatttcatgtgcattggtgtttttcctgcatggatatttgtgtgaaggtgtcagatactctgcaactggagttatagttatttgtgagttgccatgtgggtactggggaatgaacccaggtcctctggaagagcagccaattttcctgaccgctgagccatctctccagcccctgaaatattttttaaaggagctttatgcttcaaaacgataattggcaacatttcatttcttatgctgccatgaaataacccacatttatcatattagctagtactcattttatcttcagtttttcccatcagaatgaagggaacttagtagaatagccaggttaattggaggccctactcaaacctacaaagtctgctctggagccacccttgtctctgagtccatcctcatgccatctctgtagtctctttccccttcagggcccaggactgagggatgaatggctcgtgaagtggctgcactctgttttgatcaaataaccactataactgcctttataacaaattctaaactctgggatatttatagtatttctgagatctcggttgaaaccagtcttctgaaggggaattacaggtttcttcagtgaattagtctcccacattaaaagaaaatcaattcaagatttctaagtctttctttactgagaatatgtgtgtgtgtgtgtgtgtgtgtgtgtgtgtgtgtgtgtgtgtgtgtgtgtgtgtgtatgtatatgtatatttatatatatttcaaatccctaaaacattctcagcaggcatttgaagaataaaacaaacttagacctaagctagcttcatctttcctgagaattgaagtgacaaccacaaacacctctttctgaacttatcacattttctccttgtagacaattgccaatttcccctttgaccaccatgaaagcaactgaaagctttagatagaaagtgactcatcctaaaactccattatcatatagcataattagtcggacacaccatcttcccccatcagtaaacagcatcatcacatacggtttataactgtattatagggaaatgaaatttaatttgatcatttctaaccaagataatttggaaaattgaggagaatttttattttaaatggttaattatttgacaaatcccttgaagataagcaatacttcctgttcatctgaaatctattcaactcatacatggcatatgacttacttatgcttacaacttacagctcatacataactcatagcttacttactctaagccaaagaggccatgccttgaagtgcatgtggtccttgaaaatctaggtttcagagggagaatgaagagctaattggacatttgattatcagttgggatcttgcaattgtcatgacttttatttttatatcaatgattttttttattgaggacatatattagtgttgcttagctttattgatcatagtaatttaggttatataaacaatagctttcaaaaataagtcatcttgggcattgggaatatttagaaagagccaacattgtctttgctggaaagaatagaaatagtgtatcacagactctgctactggagaacaggtatttccttcaaaaatatgttatctgctttcttgatttatgagaaagggcactaccatttaggaacagttaccaataaaaagaagctgacagttacattgtcctatggtacagccattatccttctgtgtactcattcactcttccagcacaaggctaactacgaataaaacatttgagttatttcttgaacaaattagtgtggttatagtgagattcagccgaaagaggtcatgttcaatggcaagtttttaataatttgttttaataatttatatttgaagatgtagatgtttgcttttttgttcattcatgaatataatgtatacattactcatgtagtacagggaattgaacccagatcttctcagatgcttgacagatgctctaatgctgtgctttactctctgtccctaattctttgttcgtatttactgtggttcatggtgggctcccacttgaatattcagaaatacaatcttaagatgcgacttctacgtagtgtgttatgaggataattgcaataactcatctgtcctaagtgtcccagagaaaggaacagactcagaatatttttcaaagacttatccataaccactaattctaatattctttgctcatagaatctctttataaataaaaatatatatagaaagtaggaccaggggaagcagaacacatctttctgttggtctcaaccctattatcacacaatgtgagacacacacacacacacacacacacaccacaaatatgtatattttggcagttattatcgacatttattttaaagaaatcaaggtgacttagagaagaccttaatttggccagctctattatttcctcctaaggatgtctacccgagaagactctgtcagactttctatggtgggtgagagtgctgtgattctcaaggttcagccttctagcttcatagccagataggtccctgtgagcatgatgtaatgcctagagaatgaagtcattgatctggaggatgttcttatcaaagctcagttaacagagacatggtaaactctcagcatttaccttaaaaataaagacttggacttctgtagaaggttcggttggtccttttatgcccagtgaatatactcttcaggaaacagatactaggataatttttggttctggtctcagatcattaatgttactcaaagaatgcagtatggggatgctaagatgaaatagtagaaatccactgccacatttgcaagtatttaatatataattgtaagttgagctgcttatctgatcaattcagtttgaggttttgtacacttttctatttgtacaaaaaaatagacataaatgaatcatttagcctgctgggaacttcaaaatgtctctcccttgctggtggaaagccagtaatcgttactactattttcctgatattaagtcagtatggtcttctccctggcaaatccctcccttttcattgcatgctgatctggagtggctcaatttcatctctctccatcagggctgtgcttcctggctcagttgcccaaggacatcagtaggctaattagaatttgaagtttctcacttcttcatctccatacttctattttccttagtttgttctcccccattccctgtggttgggtaaagcagtgtccttgtctctcctgttaatcgaaacaatactccattgtgtcccagctcttaccagtaatctgctctgcaaacgtgatgtcctctatggagacttctttatctgtgtcatatctttgaaactggatttcctgcttattacccaagtcaaggttctcttttcccttcatttgtacttcatgcccagcttctagtaaactctctgccaccccctgttccttactcctgtcatagtagccgttacttcaccccatcacttcctgttgtgctatcttcacaactagtctggagaaactcctcttttgagacattcaggtgtttttatgaaaacaaacaaatcaaaagaaaaaccacaaactacaaaacccaaagacatcccatctaaactgactccttacctctattacctattggatcattggttgatggttcctattactgtgtctccctgcctaatttctaggctttgtatggttagagcatcctagtaaatgaagaagcacgcataagcatcatttaatggcttgcttgtattccccactaccttagctacctacctactgttcttgtaggatgtggatggtttgcacttccctcagaactcagtgttcccttactgcctcacttctgacctgcattggttctacatcacactaaatacatattaactatacattttccttttaaaaaaaaaactaaacattttcatggtttttctccaacaactttttcaaagtggatcagtgaaattcagagagatgcatgttcactcattggaccctaatgtctgactcttctcttccccaagtgcctctgaaattctgctttcagttcctcatcctcacaactaagacttaatgcactacacagacatgagctgtctacctgtctctcacttcttcagtcttctcagcactttagcaacctaattgtttcctataaaacaatgatttttgtcttcttttcttcccctctgtcttctgtccatgagtttgttccttagtctactggcttcctttgtgcttgctgtgcttgccaactttgtgcttacaaaagagaataaatagaggactcagggaagatagccattgatgcctgccaccccttctccaataacctagaaaatcactgaattgtgtctgatgaatgctgcaaactcttctttcctttcctaatccccatgtgctgtggacattgatggggccataacactgcacctgtagacagatgtcagccattgaaatcatgcatcttagatggcaggaaaggcatagtgggttatgggaggtattggctaatgcaaaacagtgtggactctggatgcatgtggaagaatgggagtctataatgtgaagagtgagcaccctgtatgtacacagtactcttgggcattgcgtgtattgttatgtcttgtttattctcacagatccttaaatggaaggtggcatcacactgttttcaggagagggatctgaggcaaggtactaggcttattattactcaggagtatggggttgttgaatgtcatgactaggataaattacaaagctccttcttccctaagtatggtgtactattgggatggggctgtcttgagttgttattggtacatggatcttttatctctcaccatccctgttaggatctccgtaggcctctgtaaatacttggaacatgaagaattagcagaggggtagagaaagataagtcaacaggatatgcaaatatgtgtattatttctagcactgtatatatataaaaaaataaaactagggtaactgagttggggcctgaaggcaagtgtgtacttcaaggaaatataaaacctgacagaattggagagtggacatggtgcttcctcagctgcagaagcatggtactgataactgtgttcacaggacacacagagttctaccagtgagtgtcactgtggctcccccacttctgaagggttcgttctatagttgcagccatcagtaatggtgaacatatgcaatccattttccctgggaggagttctttaggataagaggtgatgccttttagagggctttatacaaagaatgacaaagggggaggtatattgaaaggtccaacagaaaagtaaataactttgctcagaaaatggaaaacaaaagatcccagggagagattagcactgagagatttaaggcagtcataagagtgaggctctgccttggatacttacatttggctaaaggtaaatggagttctgtgttggattcctgcccattactcaggtcatttattttcacacaaggaaaaaaaggagtgcttgcatttgcagtgatcattagaggagaccgaggtctaaaacctcactcgatcatctccgattctgaattcctagccacttagctcacgcctagtgatcccaacactttgctttttgtcatctggaaataaatactaatataccttatacggtcatgttgacgtaagtgtcgtacattttttttctgaagatgcttgaaggtcctagcaagatattttttttcctaattataaaacacatgctaatgccatatatctaagaccaagctcactaaggaaatggcattttccttaaggacatagtaacatcatcttatgccatggtcaaatttagacgacagcgacaacaaaaagtctttgaacagccagaacttactctgtagggtacgcccacatcaagtgcttcaggtcgggtagcacgttattattttactttagcatgttccaaactggaaaaacaggggtggtgccggtgaaggtgagttgccaagcaggtagatgccacccctgcaagcaggcatggaaaggatgtgattagtgtggtgcaggagaagaaaatgtacccccagctctgcaaactggtttcaggggctgttgctgtttttcaggatgaatcttcaagtcatgaatgtaaccagcgcacaatccttctctatggagtcggaaaagagcgtgatgaagccaggcatcagctgaagaagattaccaaagatatcctcaaaatcctgaacaagaagggcaccacagaatcagggggtaaggcgcctcagtgccctggctcccattgcgtttgtgctccctctgcccacaggccttatcagagcgctccatgtcactgtccccagtgtttcctctcatgaatgactgtcacactgaaatatgaataggcacatttacactctaaggccttgcgttcattattagtagcattcgcattgaccgccttttgtagggagatacaggtgagatttgtactttgtcatctgggtgccaagctttctatggtcattgctgtgggtgatgttctgagtgacgaggaggagaaatactctgcctgcaaacagccagttcacctttcctttgcaccatttgtttttgctctgtgtttcacatgagtggcaggtcatcatatagatgctgattccacattagccaaaacctaattgccatagtagccatggctaagtctgtcaccacagaaaagtgaaagaggcaatttgatctttttgacttggaattttctttccctgttcttctcacatgtttttgttgttgttgttgttgtttctttcagagcttggccctcatagtgcgtcattgtgttgcataattgaagtcctataattatctattatctattatcatatttgcctagttactctctttaaggtttacgtcatttcataatcatggtttaaaacatggcatcattttctaccttagccctgccactgctcgctccctctctagcatggtcattcctatgaaggaggacagggttgcgtttgccctatgttcacagctggttttcctacttgagtagaaacccctaggaacctttccatttttatgacgttaatggggtgcattattagggcttgtttgtgtatgctagattttttccctacaggtggaaacaattgtaacttttgtctgccatcagcatgggtaagcctacctgagcgcaggctgtctgctggatgggctttggagaacactgtggggaagttgccctcatgtgatctgtctccacccctggctcccttcccttgcctgtttaggaccttcaatatgccagcgccacaagaagcaaccaagagccgagaaagggaaatgaaactgtcttctgttggcttcttctcattgagcttgaaaaagaaactgctctgtctaagaaaactctccttgtgctattttttttctccctcagagaaaacaggaaataagttgcgatagaagcctgaatatggaaggctcacaagtccctagccaagggcatttgaagtagctttcgggggagttggaatgcggtgggaggtgctgatgtctataagaggcacagtcacgcttaattcatctaaattagtgtagagggcctttgcagatttctgaagtttatggtggagaaagaccaaaggaagtgggaaggggaaagaagcagtcttgctgtcaagcttccttccttccttccttccttcacagttttgctttaatgccaaactagtcttgttttgtctttgtgccaaccccttaagtagatattcttccgtatggactacaaaagagatattcactgtgcgggctttcaaagtattagtcacacaaacaccacttcaaactgacatcttcctcgatttaatctcagccacagtgcacagccacttggtaaacagtcttcattttaagttattatttaagactttgtatacaagaagttagccaactgtatttgaggctacaggaaacttgtatacacacacacacacacacacacacacacacacacacacaactactttacttagcaatgtgaagattggaaaggaaaaaaggaaactatcccttggactagcatgtgctttaatgttgagaaaacaaaaattagacttttgaagaaccctttaggacacttacagaaccagccagtcttcccctaggggatttgtaactggaagtctgttgttatgttttgtctctttttgagatggagtcttctgttttccaggcaggctggaatttgagggatgaacccgaaagtctcttccccctgcttctgtctcccatgtgctaggattatgggctcccaccaccatgcctgtttatgtgctgctaagggttgacctcaggcctgtgtgatgctaagcagacagtctgctgcctgagcaacctctgctcccctaacttaaagcttaaacactatttccagttaaacagccaaatttcatgtcaacttcactataacattgtctaaaaaggccaatactttcagaatttaaaggcttaatttttttatgtaaaaattaagtattgaaagagcagtggtgcatgccaggaaaacaaggaaacgggcaaaagaataaaacaatacaaaacaaaacctctttatatccccagtgtattgttacttatgcaaacgacactgaaatctttcatttcaaagcatcattagttatcagtggtttcctttctaggttacaagacccagttatatcaagttgagcttttatgaccttacatgttcagtaatggaacctgtttatacaaatgagcaaaggaaaatgcacttgggagttctgagctaggcctacttccccaagtcttctgtgtttatttcgatccaagggagactaaatgattaatatgaacacaagacagtagtaggttggaccctttcagttttggagcaatgattctagggaattgaaaactaagtcaaaacttgggtatctcaactatacttatgatacatataagagcagtgagagagaaggcctcatcccacgtttaacttgtgcttatgagaatagatgctggaagagaaggaggtctaatgacagaaggaagtttttgtcatgtgttttaccagcacttccttaatgtatgtgagcatggagggtcagaaaacaaactcaaatgtcattcttctagtgtcctccactgtgttgtttgtactttgaaacagggtcttttattggcttgtaactcagcgaagcatgacttgtcccatctctgcctcccaggggctgtgatcgcaggccggtgtcactacgcctagcttttttttttttttttttttttttaaaacatgggttctggattccgcactcagagcctcatgcttgcagggcaagccatttgctaaccgtgctatctcccctgcccagtaccagctctttttactactctgttcattctggtatcaccatccattgtacaaagcagaaacgtgacaactcacttggattttgtatctcacttactgttcaaagggaggtccacttttgatgtggaggagcttggagtcttgccaacttctagagcaataagaaacattttgttttctgagctaacaattcccacatgaaactgagttggagtgctccctctaaccagatggcgcacagtgctgtagaagtactgtaacccaaccattactttcatttaaaaatttgtctttgtatatacatagatgaaatcctgtttccagagactttaattttgctcttagttgttaagaaaaccagttttcctcaaataagcaaaaatatacatatatttactgatttataaaagtacagaggtgagtctaaaagtcagtgaaatggctcagaaggcaaaggatcttgctaccaagcctcatcctctgaatttgatgtctggaggagagaacacccttaaatttttcttggtttaccgaaatgttccctgatgagtgcatatgaatacaaaataaataaataatccatatttttttaaaaagcctgtaatgtatcctgtttagtcacagtgggccttggtgttccccacccaaccgtggtgattcattactatatctttaaagttacttaatgatgaatgcttgcaaagacactttataatagccagaatcaagtcattatttgcaagaataagtagtggcatatttttatgcattggaataaagtatgtgaaaattactaacaattagtacacattaaaattacctaaataatgaggctatcttaaaacatagtgttgagtgaaagtttccacccacccacgatggaagctgtccaaacctttggccccttggggagggagaggagattagagtcaggtaggtggacttttgaggtactatttcacgatttggatctcattctgtttgtcaaaatgcatagagtatatattgctttcatctattattgtgccatacttcagtaaaaaatacccatataaagatgggatggggaggtaactcagtaacgttccaagtcccacataaaaatagctgggcatgatggagcagggttgtaatcccattgctgtggaggtatggatataggcagaccccttgtgttccttaaacagccaggcaagctcacttggtgagttttggccagtaagagactctgttgtagagtaccatcagagagggtaaactccaatggtgtgattgcctgaaggatgacaccaggtatttccctctggcctccacacacgtgtacaaacaagtgaacatgcacacacatacacacacacacacacacacacacacatcaaaaaaatctttagaaatatgaagagattaatttaaatggaaagtaatacatctgatgtttctttagttggggacgaaggacagaaagccaggaagaccaagcaggaagtttttccaaccccggaaaatgtgttcacgaaactccaactcctctcatacttcgatcagcatcaagtaacatctcaggtatccattcagggctgtttgtcacatgctttgaatattcctcccttaaaagctcaagcagtgtacttccagccttaacttttacaaatgacccttatagacttggaagcagaacaagcttcatttgtgagtattaggtgtttccttcaacacctgtttttattatgtaagtatttttgctttatagtaattattaattcataaaggtaattcctaatatacttattatataacatgctgacccagcatcactattggtgaaggagaaactttttgatgatttaattaaaatactgggaaatttagaagaaatccattgttattcagttaacatgtcagtttctgatgactcacacttttgagtgatttccctttggggtcaccagtatctagattatattgaaattttcaaatgatgtttgtaagaatgctgatttgtatatgttttgacttccacggaaatactaatttctaagtagaatcacatgaattcatatgtgttgctggaaaaaaacctaaaacgaaaacaatcgaagtgatatatcgaagtgaagcctcacccagactgttggttgtgtgattttccttgcttttgtctgagcagatctctaacaatgtgctggaacaaatcacaagctttgcgtctggaacatcctatcacctcccgttggctcaccatattcagctcatctttgatctcatggagccagcgctgaacatcaatgggctgattgactttgccatacaggtgccacagagactatactgtgcctttctcacatttaggaaagcaaaccaaccagacactagagtttatcttgcttcttcatactctttatttgttgatttaaaaaccaggctatcccttactgttgagcttgtctgaactttccatctgaagtgaccaccctactcagcccccaagtacctaaggctacaagcttgtgacctggcttacatttatatgaaatatttttagatttattttatgtgcatgggtgtcttgcctacagatgtgcactatgtgtgtgcctggtgcctgcagagttcaaaagagggcattggctcccttggaagggcgttacggatacttatgagacatcttgggggtgttgggtactgaacatgggtcctctgaaagagcagctagtggtacttaactactgagtcatctctcaagcctcttattttttaaacttgcataaatatgcaaaaatgtagttttatgaaataccatatgatgccataaaacatgtatatgttatgtatattcttatagcaaattaaacatacctattcttcaaacatcatttcttgatggtagaaactgtcaagagtccttttccctacgtttgctaggtacagtgcatcctgttacctatagccgccctgccatacatattacacgtgaagatatcttgctcctgtaagaacttagtccccactgattaactttccctaatcacttctctgtcccaactctctttggcctcttggaacttcatgcctttgaacatgtgccagttctgttacattaaaactatttaagctgggcagtggtggcacgtgcctttaatcccagcacttgggaggccgaggcaggcagatttctgagtttgaggccagcctggtctacagagtgagttccaggacagccagggctacacagagaaaccctgtctcgaaaaaaacaaaaccaaaaaacaaaacaaaacaaaatccctaaaacaaaacaaataaaacaaaactattttaagcacctagtacattttaaagtgtttgagacattttgagttaatagttttactgttaagctatagttggtgttagtaatacacaacttatttaaaactatgtatacgtgaaagatgtttttgttttggtgtcggttgttgttaccttattattttgcgttgggaataaggaaatgatatattctctctagtagagttaagcagtgaaaagcacaaatgattgttaaaatactctttataatttcatttgtcccactgtagttacacacattttagatcatttattccttgtgttaataaatagacattaggtttgatttttttctattgtacagttactccaagctttataaataagaatgtagttattatagttatcagttgtgttgcattgaaaggaaaaaaaaaaaaagaagcacaacaaccaaaatgaaaaagaaaaaaagaaaaaaaggaaaaaaaattaaataaagaatggggttgtttattaaacgcttagttccaggctctgggctttcagaaagttttggtgactgtttcagcactgactacatcctggttgggtgcatgctggtgtctagacagaaaaacattcgtttaaattagtaaaggcttaaaagtaaatgccagcaaaagcttgtgtgctttctgattccgtagcgtataggaaatgtgcactaggggttcactgaacggtttccctgtttgtcttcttccctcccctccaaccctcccttcaccccccccccaaccccacttctgctgcagctgctgaatgaactgagtgtggtggaagcagagctcctcttgaagtcttctagcctggcaggaagttacactacaggactatgtgtctgcattgtggccgtgctcaggcggtaccatagttgcctgatcctaaatcctgatcagacagcccaggtgtttgaagggtgggtatataagtagcaatgtttttgttttttgtttgtttgtttgtttgtttgtttgtttgtttttcttatcctaaaaggtagaattcatagtgaaatacagtgcatttgggagaaaaattatactgagttctaaaaaagtatttttgtttagactgttggtctgaagttttgataccactcattttgaagttttagatgtcttattaaagtttcaatgaaaacatcccaacaatggtcttaccaaaatattttgtagagaaagagatataaatggaggaagtgtgtttgattttttttttttttctacttacttactggcttcctcttcacctcctggtcatgcacagctctcttctcatttatgccgcccaacaacttactgcgagcagtgaatactgggatctggtcatctattttcagtgtacttttgaaaaaacaatcagacactacatagtccttgcaacactgcaaggattctttgcactgtagaaacttggccatcttctttctgactcatgaaagttgttcgtctgagtgtctaacggacaaaagcttctgctgtcgctcataaagtcgggctaaggaactgtctgcaagaggctgtgcttaaaaggccagggaaatgcagggagctctgtgcaaacatcgtgttgcctgctcctcacctgcatttctagggccttttattaaaaaaaaaaaaagacaacctattctttattcctctgtctcctcatttgtcttcttggttttcacccatcccctctgtaaccttacacatgcatttaatttataaacagtatttctctagtggcatctactttgcagaggcttttctttgatttacatgtacatctaacttaagaagtagaatattacaagcctcaaaagctttacagtgagagaaggtgtgtatttatgtgaggcctcgctcttttatatcgttcgacaggtgaagagtttggaagtgatgtgccccatattcattacacagctagtatatgttgcaaattgaagttgactccttactgttttttcagcactattcttttaaaatcattcaattttaaaataataattcatttaacaacacattcactgatcatgaactcatacatacttagttggaaaaagtgtttttgtttggttgttctttgattgttagtttgaaattgttttaatattttaacatttaaaatattaacttaaatactcataaaattatatttggcttaactttgttatatttttaccttatttataatgccctagtttgctcgttgttgctacggtaaacgctgtgaccaaattcaactttatcaaaggttgtttttttgttttttgtttttttgttttgttttgtttttcagtttatagcctgtagttgtatcattgaagcacaccaggaccagagctcgaggaaaaactctggatgcaggaacttactggcatgctccctttgccttggtcagctagctatcctatacaacccaggtctgcctgcctagagatggcacaggctacaggaaactggaccctccccttgtgaagcagaaataaagcacgtctgtccgccccccccctcccccccgtcattcccaagtgactcaggttgtgtcacatagatagctgtcttaactattgacacaccgtatgactttttttttttcaaaatcacaatcccccccttaatgtgactgagagtatcagaccacagtccaaggctttagtcttagaaagtgaaaactactgtaagatggacgcacctacccatttgcatttgtttactttagtcgcaggataagtctttactttccatgctctgttgggatttgtttgcttctgcatacccagcagattcaggtgttgcttccctcttaaacgatggttccattgtctgtacctgttgcccccccccctttttaaaaaacattccatttaaaaaatctttttattttttttccctccctcaactcttcccagttatcccctttatcaggcccttccctccaaatccactccttttccattttccttcagaaaagagcaggcctcccagggatatcaaatgatcaagttacaacacaactaggcacatcccttatatcaaagcggacaaggttaactcagtgggagaaaatgggtcccaaaagcaggcaaaagagtcagagatagcatgcactcctgctataaggaatcctaccagaacacctagttacacaccgtaacatatatgcaggggacctagatccgactcatccaggttgcttaattgctggttcagtctctgtcagcccccatgagcactgcttagttgattatgtaggccatgttcttgcggtgtgcttgatccctctatctttttttttttccattttttattaggtatttagctcatttacatttccaatgctataccaaaagtcccccatatccacccacccccactcccctgcccacccactccccctttttggccctggtgttcccctgtactggggcatataaagtttgcaagtccaatgggcctctctttccagtgatggccgactaggccatcttttgatatatatgcagctagagtcaagagctccggggtactggttagttcataatgttgatccacctatagggttgcagatccctttagctccttggctactttctctagctcctccattgggagccctatgatccatccattagctgactgtgagcatccacttctgtgtttgctaggccccggcatagtctcacaagagacagctacatctgggtcctttcaataaaatcttgctagtgtatgcaatggtttgacccctctatcttctcctgtcctttctccctcctcttcttctgcgtgattccccgtgttcttcctaatctttggctatgggtctctgtatctggccccattagttgccgggtgaatcctctctgatgacagttatgctaggctccgatcaatagcagaattatccttaggaatcatttcattccctacttttttccagttgtgtttggttctgtcctaggtctctgggctatctagcctctggttcttggccacccaggcagttcaggtgtgggcttctcatagagtggctcttaagctggaccagtcactggttggccactcccaaaagttctgtgtcacctttaccccaggacatcttgtaagcaagacaaattgtaggtggacgatttgtggctggatcggtgtcccagtcctgcctctggacgccttgcctggttgcggaagatagccagttcaggctccaaatctcctattactaggagtcttcgctagggtctcccttgtagattccagggagttttcattgcactatatttccaccttgcccctcaaatgcccccccccatagttatctttcccagtactctctcctagtactccatcccacacctgatccctcctgttcccatgcccatctcccctcagtcccttgcaaaatcttctgtttcctctgcgcagggaggtccacgtgtctttccttgttactcagcctctctgggtctgtggattgtagcgtgattgtcttttactttacagctaatatccacttatgagtgagtacacacctcaataggacaaaacagcagtctacagaataggaaaagatatccaccaactctatctaaccgagagcttacatctaaaatatataaaagaactcaagaaactaaacatcaacaaaccaaattatccaatttaaaaatggggtacagttctaaacagaactttcaacagaggaatatcaaatgaaaaaaaaatatcaaatgagaaaaaaaaagttcaacatccttagtcatcagggaaatacaaatcaaaatgatctagagattctatcttatactgtcagaatcactatggtaacaaacaaacaaacaaacaaacaaacaaaaaccccacaagtgacagctcatgctggtgaggatgtggagcaaggggagcactcctccattgctggtgggagcaccaacttgtacagccactattgaagtcactgtggttgtttctcagaatctacctcaagaaccacttctggacatatgctcaaaagatgctgcctcctaccacatggacacttgctcaactatgtttattgtggctttcttcataatagccagaaactggaaataacctagatgtcccttaaccaaaaactagataaagaaaatatggtacatttatacaataaagtattagttcgctgttagaaaaaaaaatgacatcataaaatttgcaggcaaatggatggaataataacaacaacaaatcatcccgagtgaggtaacccagacaaacagcatgttgtcctcctttataattaccaagttccccatcaggtgacatccttcagactacctgggatattgcactgcggttccttattttcctggcatccatgtctgatgctggagaatgcctgtccctagtgggcctgaacattgcagactaccacctcttgatcttccttatcttctgaataatggagagtggtccactatgcacccagcctcccctttcctttctctgttcaggtcacctaatagccttctttgtgcagtgatggtggtaagatggaagaatattattaaactcttttcagagtctcagccattggtgacactatgggtgacatgttatgtggagtcctgtgtcggatacagggtggtggtggagtcagacacatgtatggatgggccacaggtgttgtcttctatgccatactgatggccatcttgtatggacagaggagccatggtttggaagggaagaaagtggctgtggtgttggtactcttgaaaggctggcattattataaaggatgcctctacagggaatggattttcatcttcgtacataagaagccaagataaatttgtctgtagtacaaagaagaggaatgggattccaaaccacggcttcatcaaactcagcagatttcctgcactgaagagttacttctttccaaactagtgaacttggcagtccatgtcaactaatggaagttgtgaaactttgtgttgacttaaacttctctgcctagccttttcttttttttttctagtcaaatcagcctaagtgatggagttttgagtgttaattgcagtgtggagaattcatttcattacatatgtttcttttaagtgatgtttctgagggttttttaaagcttttctagtattcagtgtaacaaaaattgatatttaataacttcatagttttatgagcaatcgagtttctttttatgtttgatacatacttctaagtgctgggtagacattaaagaattcattactcactattcacatactatcaagacacgacttttttattcctgtgtctctgtcctcaggttgtgtggtgtggtgaagcacgttgtcaacccctcagaatgttcttccccagagagatgtatcttggcctacctctatgacctctacgtatcctgcagccacctcagaagtaaatttggagacctttttaggtgagcaggaaaaagtaaaaaaacaaaaaacgaaaaaacaaaaaaacctacagacatgattatacttccatcatgatcacacttccgtttgttaatggtctgattgtggtttatattctatgtactgatgtaagccaatctgaagtgtttgatctacccgagactcatttagacagatactaaaatacttaatgataatagtacaagatttttttttcgtatgtacataacagtgattttaggtggcaagctgtacaacacctgtgaaagggtctcttatttaagatttcacattcttttagaagttctagatgagccatattgaagtcatgataaaaatctagcatatgcttatattttgatttaaaatataatttaaaatttgaaagtctcataatgcttttgtgtcatgtcctctttgttcccatcttgcctttttagcaggcttttcctgctacattggcttccacactctttctgggtcacaaagttgcaaatcttcccccttcttagtgattctttaaggctctatatccgtaattttataccacctcccaacctggtattttaaaatttatttcttctctttttaaaatcagtttagtctttagcaaatcatttgcccatgcatgaatgagctttaaatggaaggctagcacttctctaaataccgtttaaccaacacgaattaaaagcagttatttgcatggcctgtttttactcaactgagttacactgtgataaatccctatgtttgcggcatgatgcaagagtacgtgtgttgattatggacaactgaccggcttgttagtaagcctttagatgacagccattctcctgccaagaattttactcctgtacattaattgtgttacttggggaacatttttaaaacaagtccaaacgtttttagtgttagaagctttgtacttttatcttctcagaactcttactcagagcttataccaaattaatttttgcagaagttagagcctcgtgttagtgcacatcgctctttgtgtaactatggttacagtttcttgagtacaaacattctgtattttgcctttgctttcacctcactttgaatattctttcagagatttttgcaagcttgtttcatttgtgtctctacttttttgtctgtaaagtcttgtagagtctccagttcctttcatctgttgcttagcattgtgtgtgccagatattaagtgcctgttgggaagttacaggaggaaataatgtggcatagggtattgaaatccacaagatatgtcagtaatggttttctttgctcctccttgctctgtgttcagtttgcttagaaataccatgagctctgacttccatgtatagatcacatttgacctctcttcaataccccagtcacggccatcataggcatctcttgcttggaccaacttgcagagtccttctcattggcttcattgcctttactcagactcactatagcatattctcagcacatctgctgaggtgactctttcaaccagggatgattgtgaggcacccatggttgtcatctaggcagcatcaaactcacagctctgatggacattgagatgtgttggcttccatctctcctgtgttcctttcctttagtgtattctcttctgtctccagaaacccacttctggtcctcacacccggagcactgactacttgctgctgctctggctctcttcctttgtgtagtccttatgccttgttacacagtgtctgtggccttgcttgctggcagccttgtgttcagtgacaacccattctcagtcagtcattctgcaaacctcagtattggctagccttctctctctctctctctctctctctctctctctctctctctctactctctctctcactccatatatatatatatatatatacatacatacacacacatatatatattagtttggctcctctatgggatgcaaatctcctaagagcttatatttttctcttttatcccaataatattgtattttacacaaaagcaatttatctacactactgttaacactgttgcactgctgttggtaaaatatgagtggcattaataaataaaactgacaaaatgttaccatttgatttaaaatagccctttgtaaaatatttgaatgaagtaacaataaaaatacttcatttccttctattgcttcattttgagttttcagtttacgcttctcaaagataggcttttttgcaacagccctggttttagtggtgggcagcccctattattcttacaattgtaagtaccaggtggtctaagtgagttcattaagagcacaggatttatttttaagtgattaccagtggactaaggtgctcctaacaccaggagcagaggcatcacagataatgaatgcacagtcctcaacaggaaacggaaaaggagtgcagctctctgggcatagtgtacagtcagaggccagtttggaggttaggaaaaacatagacagagaagctacatgttcagtgaggttttggttagtacaatagcaattaaacattgtaacagttttaactaaaaccctgtaactttgtgtagggaggaaatttgagggacaggtcacactaatcacatctcctgctgcttgagcttctgcgtgccacaaaactgtgatagtttttccattaaagttttgaattgtcgttatcctgggaagaagagtgagtttctttagctacaaatgattgttcctgattatttttgacatactgatgaagctcagatttaaaacaagtttttctgacctcaaggcatgcgttgctttcattactctatcaggttttcctgagacacacagttacagaaggagcatgcctgaatttttggctcaattccccacgcgtgggcagcagagagtgggaagaatgagaacacattctcagtggcagccagcatcttatcaaaacagagaggctcctcttgggaagtagggtaaagaagagaaagagtctagaaaggaaaggtgcagagactcagaggttagagaagctcggatgcccgccagagaggttctccagagaagtctgaatttgacagcagagtggagtagatctcaaaacttaaggaaaagaagaaacgcttctgcagtttaatagaggagatttatgtgtcaccccaatgacagaaccttcacctgccaggattttggtccaaaaaattgtactacatagtaaagctcttgagcaggaaatggatttctgcttgtggatttactgtacacagctagagcacacaaagaacggagctcatatggaatcaaaagcttgggatcacaccattgctcgtcttgtctgcagagaaacattggagaatacattctaatttctcttatttccagtattccgtatctgttcagatgttgcccactgaaaacactcatttcctaaaacatgtttgcttccttgttcagggcacatgcccagctaggtgggaacttagccctctccatttggcatgttgtaagtttcttcacactatagaatgtatcatctgtattcccctaggagagcatgagctacacagatgccggagttttacctccatttgtcccagctgtagcttagagctcacagtagctttggcacagtggctattactgggcatactacacccaaagaaatagggtttagggcttacagtcggagttaaaacactgaacttttccttgtgtgtaattggacccatttttatttttaggttataacattttacaactactcttaagaaagaaaaagttgttagaaggctcagtaaatacattgatttttgtttccatctataaattaaaaatctcttcattaagcaattactctatctcagatattgtaccaatgctggtttacaaagattttgctattagtaatagtaggatatagatggtctaggaaagtcttagagtagttgccacttagcatgtctgtaagtgaagtgattttcttggttgctttgttctttttttttttttttccttttttaactgtcgttttctaaccttagtagtgcctgttcaaaagtaaagcagaccatatacaataatgtgatgcctgcaaattccaacttacgctgggatccagactttatgatggattttattgagaacccctcggcaagaagcatcaattattcaatgctgggcaagatcctcaatgacaatgctgccaaccggtacagctttgtgtgcaacaccctcatgaatgtgtgcatgggacaccaggatgccggccggtgagctgcttttccctgagtgcagcagctatcaagggcgagctgctttggagtttctttagtaatttctgattctaccccactctctcctaactaaacacttagcctgagaaatcatggctttggggttcttggtttggctgtagacattttttattggtggtccattttgaaaagcatatctaattttaaagacagcactatcttttgatataaacttgggcctagttacatcacataatgtctttaactatttatcctggtgttattaccgactgattccaggatctttctcatagaatatccccaagcttgtgtccttaacttttgatccctataaaatgtaaaattgtagacaaggtttattcagagaatcaaaaatatgctaattcatttcttataattatatgttgctgtgtataattataccttgtataaatacaagagggtattatatcctgaaatctaagtgatgcttaatgataatgaagtatgtattcagtgaacaaaccatgtgtaatcattttgtttttttcatatattccttctttttattaaatctttttttaaaaaaaaacttcagattttcttcccctcctggtccaccctccgactgtttcacaccctatacctcctccacaccccacacccccatcccagcagacctccctggggcctccagtttcttgggggttaggtgtaatcagttcttatttgttccagttcactttctgctatcttctttttttttcccccctaggataaatgacatagccaatttctcctctgagctaactgcctgctgtacagttctgagttcggagtggctgggggttctgaaggctctttgttgttcttcaaatcatgtgtggggatttaatgatgtcctctgcacggtggatgtaagttttcttaacttatcaattactaatttactattacccatcttttactgcttaattaactaaactctaacacagcaacatatttctctatttccaaaagtgatgttcaataccacaaattcaataaattaaaacaaaacaaaatagacgtaacagaaggaattccagtgtgttccctgttgcctgatttctagaagctaaggttttaaactatctcagctgcttcgtttttttgcagcgtggatccctcaccacagtacataaaacgtttcatgcatgaggagaaccaccatacacttaagtctaagtgtacagattttgttgttttgcataagaaaatccacgtgcagcctcaggatattcagtattctcaggctatgcctgtagagtgatggaataattgcccaaatcatgttccttgacttcctcgtcttccatgttgcacccatgatagagatagagatagagatagagatagagatagagatagagatagagatagagatagagatagagatagagatagagataaagatagagatatatattcgttccttaaacatttctgtagattctctatccatttatgcctttatcattgcttggggtgatctttgtcagagctctatatgttattaaagaaacttgacaattgtaatgctgaaagcttatttcctctttctgctgcttcagtgctgaatggacaggcctgcctccttatccacattccgtggattaagatattatttgtgcaaaatacattaataataggctgcttttccacaccaacaaagacctaagttattttttttctgaaatacatatttgtgacttgctgcacctagtaccagtcactaggaagattgctattgtggtaattgtgttctcttagtattttcttctaatattttgtgagatctggaatgtagagatttccctgtagctgaactaatttttctccccttcctttctctcatttttcatttttaaatatagcagccaattgaaaactttcagagttcttttaaatgaatcctctctcattaaaaaaaaaatgcattagttgtgacaggaaagaaggttcaggtgttagtgggtcctgttttcctgctagaggcttcaccttctccttcctgcctttcccataaatggcgtatgtattccattggcaagcatcagttatgatacaccttttattagcatctcaattttgctcttgtgttgtcttctctcagttgcatgcacatgcaactgacaggttaaaggccaacatctacctagaacactagaatatgagtaaacgtgctttgtcttatcatagtagcaataggcctaagaagataatcgcaagtcttttccctctgatggttcatatggaggtttgagatcttagtggtatcgctggtattctcttaggtctttgatattgcactaaaggatgccgggtattaaaacctgtcaatgtttttcttaaaggtgagtgacctttcattccatgattcattagctactttcattgctatcctgatagcacgacagtgtttctccctggaagatgtcgtgcaacacgtcgcacttccctctctcctagcagcaggtaagctggtcctgagctgcgtctgctattgtttcctggttggtagtcacctgttacctcttaagaacagggaaagggccatttttaaggatgtgtgcattgtgggatggcattgtacctgcaagagatggtagagctgtagtagctgttttatgcagagtgacactgaactctgggacaggaaactgccattgctttattcggggtgtaaggcagcatgaaggttcttcagaacgatataactaatggccttactaaacagaagggttatttaatgtattacagaaacgttagtagtagcaaacccgaaaagcttgttgtggagtttgtgaggaagcttgttttaaagcctcctcctctttccagcttgtggagacgcggatgcagagcccggggcaaggatgacgtgccgcctcctgcttcacctcttcagagccccccaggcctgctttttccctcagggaacaggtgagctggcctcaagagaaagctctgctttggggtttattgggcacttttggttctactgtgaccaagtgagctgtccagtttgtcatttcctccctgattttcatgggcttgagctgcgcatgacggaggagtgagatcatgccattgaagggctgtcggcaccttccatgatgtaatatgcggatatattgggaaataaaaatgaggaattaataaacaataaaaatgcctgggctgttaggaaatagtgtgctggtgggaagtctcagtctcttgtataccctgtgttgattctgagccatgccatctcagcttaagcggatgacaactcatttatttatctttcctgaggcaatggagggtattagtgaagtctggtgctaaatcatttccatatagagatggatgcatctgtgtgggaatcctgctaatctttggaccacatctctttgaggaataggaacgttgttttaataataattaaagaggaaaggttaagtaagaatactggcagtgtttctgtggggcatcaggtaatgcaaacatgtcaattaagtgcccacaaacaaccaatgaaaagtcttactgactgtgaatgattgcagaaggtggttaatggcaatgaagaggccactgaaggtttgttgttgtttttataggcaaacctttccccggaataagatcatcttgtgatagacacctcttagctgcagctcacaacagcatagaagtgggagcagtttttgctgtcttaaaggcaattatgatgcttggtaagactatcctggcctttagcttcttggctaatcaccggaagtggaggcaaaaataatttatatgcactgtaatttttttaagctatgagatttttttttagatgttttcattatatacatttcaaatgctatcctaaaagctcccctgtcctgcttccctacccacctactcctgcttcttggccctggctttcccctgtactggggcatataacgtttgcaagacccaggggcctctcttcccagtgatggctgactaggccatcttctgctacatatgcagctagagatacgagctctgggggtactggttagttcatattgttgttccacctatagggttgcagatccctaagctccttgggtgctttctctagcttctccattgggggccctgtgttccatcctatagatgactgtgagcatccacttctgtatttgccaggaactggcatagcctcacaggagacagctatcacagggtcccttcagcaaaatcttgctggcatatgcaattgcactgtaaattctaagcaatgttaatggaaacatatcttttgtttgcttgtttgtcctgggggaaaaaaattggttggctttccctaagcccaagtaatgggcacttcaaggattctgtctcttaactacggtgaccctgggagaaaggtaatagaagtactgcgtgttggttataattgtgtgcttcttcattgtgatgtaaatcaggtcctcattcccacaggatcgtttgcctttatttactgacggaaattgtacttcatatctttaataaaagctttatgtttcagccagattatattccaggtgcaaaaacaaagaaaagctggattttaatttcgtgtttctccatctgctgtgactctgaacaagtttgtattctctgccatattgtttttattaagcaaatggagctgcaatggtgcttgtattgctgatgttcagcaggaggggcacaggtttttcctctaattcacagtgcccaagattccctagacattcttactggtacacatttaacaagagtaatagtgctgccttctgttcatcggcagggtgacacctcaggatatttttatataaaccataaagcatttgaattaggagaactccaatattgcctacttttaactttgggtacctcattttggccataaccaaacaatagttgccacatcatgttataaagtagttcatgatttaaacagaattacaggatagacaggtttccatttaggtgagccttagataacacagataaaaatatagccttgccttgcttgacaaatggtatttgtgcatggcaaagaataatagcagtgtttataaagcagccttttaaaaataaatgtaaaagaatatacatgaaaatgaatatacaaatcttttcagttttctccaatacaatgttatttatatcagccacactccagagcaagccccatgccccagaatggttagccaacacaaagtgtattctgcttttgtttgtttgtttgtgttattttattgattatgttgtttagattttctttccttggttttggatttttttttttttttttgagaaggatcatggaaatggctggttaggaaaataggagagagatctaggaagggggaagaatgggcttagggccataaatattatacagccaatactcactgctgatttcagccagggcaaggagagctggtccactttactgattagtaatcattggggtcatgaagacaggaattagatttatctttagatatttttaagtctcatcaaagaaagtaagaaatatattttcaataaacttatgttggaagtatgaatgcccaccacatgtttcagtggcacccacaagatgagtctcatctagacagtgagccctttgtttgcagaactggactaatcccaagtaaagttgccagacttttcagatattcaaataatgtgggaggttcttggtctgaaaaattataatcagcacagttatatgccagtgaagccttagacagattcacatagattcacatagaatattctggttttttttctgcacaattgcggaggttctaacatagttacacagacttcagtaccccatatccaaagtaaatggaggtctacaaggggtctaagaaatgagctaatttttgctcttgccttatccactctagtgcttttaaccaattttttcccaactcttagctaccaaatatatattaagacaggaaaataggactattatcgtgaactttgctcctaatttgcatagtattttaacttgaaatagagatagatatttacatcatctaagtgtagagaatacacgtgtctgctaattttgaaaagtgctgttgaaataaataaactctcatgggtacagctactaggttttatattttaaggtacatgatgagtgtatgaaaacacattggtaagttgagatgtcttgcttatttttacccctatggtttttctgcttagttaatgtgtggtggtactgatggtgctgaggagagaacctaaggtctcaggcatggtagacaagtactctgccactgagtgacagccttagcccctctgcttctaagatttttgagagtagacatttattaggacattttgattactcttcctcccaagaaaagagtttttggggttttgttttttgttttttgttttttttttttcaacagagtcaaaaccttttggggattggccttgagttttaagttgtgtttgtttgtttgtttgtttgtttgttttggttggtgttgtttgcttgtgtttttgcattgatcttggcttgcttttactccacaaggcctcccctgaagtcagcctctggtttcaggaaatcatcttgtcaaagcttgttttgatttctatagggaaggaggcaaaagtttgaagtctctgctgctgtctggcaatttcactaccaaattatctcacactttttttttttttttgagatttttatttcatccaagtataccctgctgagtgttttggggagacaaatacctcccttagcttcatcttactcagtgtattagagtttggtcgggtcaggtctacgctggatgctgtagattttcttgtctataactcagataaacttgagtacacgcatgcctgaagttttggtgaacgcaatgtgtttgggttattaagtgtcatccgtaatggctctttcaaagctagcaaaagagcattaaatcatgtaaaccaaaagaaggagtgaaccttgactttgacttttctccatatccaatggttttgtttccttttatgtatttcttgatctacgcattggacaactggctatgtagaagtgacaattttcacacctctcgagtccctgaaacctagcctaatttgcttattacatatttgggacaatattttgaatgtctgtgactttgattttgtgattctgctatttaggcgatgccaaaattggcagtaacaatgtcaacacgatgaagaatgaagacttcggcatgaggggtttacgacgtgatgggaatgctgaagatgcctgggccacctcgcagaactcaaaatcgtatgggaaaagtatttccatagaaactgccaatctcagagaatatgctagatacgtactgaggactatctgccagcaggtacttatccaatttcaaatggcttctactttgaatatgtacctgattttggggaggcaactatccactattttttttattattgtatttaagtattcccccccttttttccccaataatttcaaatttgttaaagagctgtgataatggagacttttagtgtatcctttatacagattcactaattctggacattttgtatttttctcaacagttgacaagtagatggtagtatctgtcccatctctttttggttctctgctttacttctgaatacttacattctcatttcttgttacaaccaaagtttagttaataaaaatcataatctaaactttggtgcaataatcttttccccatctctaggggattttctgatttattctagtgttgttagagttgcataagggtctagagattaacttcaggtcattggagtcggggagagtttagagctgaaactatattatttaggtgaccactactgattgcacacatttgccctcttcaccagtaggtaatgttagctttgatgaaggcatctaaagattcaggatccactagagtgttagtatgctttgctctcagttaactagtaaccttcagaaagatgctctgagatgatgcaaatattctgatccttgttacacaccccattcctcataagaatcccttgtgattcttgtctaactcagtctttactatgacggctgcaaaatgttgtgtttttcttctgagttcctcttgttcctccacatgatcagtttatgctctacaaatactcttcttatgttgttgttcatttgtatttatttatttagttatctatgtggatatataacacattgcctatagcttctttaatgtccagctcgttcaagctgacatattaggaatccgtcatcctaccttttgttgtaattggaatatttctatccttttagggaactattgccttactttacccgtcccccatattccttgcctcatagttataatcagccattctgaggagtgccatttctgcctgtgaagagactggtactcagaaagcagagtctgagggctgagggatagatcaatggtgacatgcttgctgtgcttgcataaagcctagaatcgagatccctatattcatgtatgcactgggagcctgtggcagcccacctgtaatcccagaactcagaaatggagatacaggatcctagggtaagcaggctagagagaatgactaaataggtaagctctgagttcatctaagagatgctttcttggtgtataaggtggacaaggatctaagaagatacctgacatcaatgtctgtcctctacacacattcacacatgggcattatccatcatgttcagtatgtatgcacacatgcatacaggcacgcatgcacatgtgtatacacacatgcatacaggcacgcatgcacgcacacactaaaagaggaaagcaaggtctgggttataaatccccactgctatcgagtatcactgtttttgaactctcccagcagacagagctgtgcgtgcacatgtgtgagcctttgcatacatgtgcgtgtgtgagcatatgtgtacacatgcatgcatgtgtgtgattataaattcatattgatacttctagttctaatctaatattttaaagctgtatttttatatactctcgcttcatattagtaattacattcttgccttgtcccccatacagcagctagcatggtttcagagttgttatacatgcaccattaggaaaaggggctctgagagcactgagggttcatttatctgaagggtttacgataatgcattcaaacattatttggagaaacaggaagggaaaaataaagaaaaatgttttttacagttgtctcacttatggtgaacatattctttctttaaaattagaatcacttttatttactttgttttattttgtttgtttgttttgtctgttttgggtctcatctaatgtttgtatcatagcataccttcaaaagctctcataaaagtgcacacaataacctgtcctcacctgttgccttctccctatctggctctgctccgaagactagcttcagtatcttctgattatctttccatactttcagaaatcttttattttaaaaatgctgtatattacgtatttttgtagcgtgcattaagtgcacggttccttacatttgttttcactgtggtgtttaactgacattacagctattgatggccattgtggatcagtccccaactgtcagcacacagtggtgccactggactgtgtatggttctctagatgcctggaaccagatggagctggccaggtttagtgtcccaagaggctctgctgcaagccctatgggaagcctctggcctgccctacagtgccagtatccaataaacaaaaacaaaaacaaaaccaaaaaaacaaaaaaaaccccaaacaaaacaaaaacaaaaaacattaatcagtttgccagtaaataataatgtgatacctagaaaagcaacacactgcatctgggtgccttggtctgaggttgatttaatgcagctaatatagaacatgggattatgtaacttcagtaaatacccggagctgagcagctgacacagtgtaaagggagacttacttcatctgaaacagatttgggttcagattgagctctgatactgatagtttcttaatgccacttaataaaagaaaaaatgctaaagaaagatgttagtgtcaaaagaagtaaccttctaagtatttatacactttacctgtttagcagaatatatcacataagaattatgaaagttatataaagcatgaaattcttgtccctaaatattaagtcaaagcaaacaaataaacaaaaacctggttacaaaatagtaccttagagtaagtccttattttttaaaaatcccaaattttaactctgtcccacagatttaagtggtttctggtttaactcaagccctcccctccttggatttttttttaaagatgtcaggtgttataattttgttttgaaatttttccattagctggcaatgtggcttatttgataaagagtgcttgctgaacatgcagggagctctggtaggcaggaagacatggcattaaatttaggcctgttatcccaggactggacagagcagaaggatcagtagttcaaggttattcttgaccacatagtgacttagaggccgtcctgcaatacctgagaccttgtctcaaagaaaaatagaacaataacaaaagaaccagcatatatctacatgccagcttttctccacccatttttttcattaatttcatttcattagattgtctttactagccttttatcattttaccctgagaaatgagaataaaatcaacagccaggtagaatcattgtgtgccagtctaactgccggcttgtttttaggaatgggtgggagaacactgcttaaaagaaccagaacgactgtgtacagacaaagaactgatannnnnnnnnnnnnnnnnnnncccactcccccttttggccctggtgttcccctgtactggggcatataaagtttgcatgtccaatgggcctctctttccagtgatggccgactaggccatcttttgatacatatgcagctagagtcaagagctccggggtactggttagttcataatgttgttccgcctatagggttgcagatccctttagctccttggctactttctctagctcctccattgggagccctgtgatccatccattgttggaaagatcaggaattcaaggcccatacctaaacatgataaaagcaatttacagcaaaccagtagccaacatcaaagtaaatggagagaagctggaagcaatcccactaaaatcagggactagacaaggctgcccactttctcctgaccttgattttaattctgacttttgttttattctgtaattttctttacagtgacattgccactgctggctactcagtagatacagtcaatagcaaagggcatatattgtattttaagtcagtggtatatttacttgatacatagtatttatgatagctcaattttaaatgtgttatttaagagattcatcattttggagtgaggttggctaattggtaaatggattctgagagaagccatacttgtctgatttctacttcctggcttgttggtgaacgtattttgatgcttgaatctactttgttgtgcatgttcatttttatcaggcatgggattggaagtctttaaggcttgtgagtttccttgctgggtatgagtattaattactgtaaggctgtgttagcatacattcagtattcaaaatgtgacaattcttcgaattttctccagaatcttgagcagtggacgttgagacagtcctggctggagctccagctcatgatcaaacagtgcttgaaggaccctgtgagtatatattgacagcacacgtgtgaactgaatagaaaagcagaatgtcattggtgcttgaaaatcaagaagtgtgtagacaagttagctttctttttcctgatactagagctctggttctgtggccgaaatgaataatttgctggacaatatcgcaaaggcaacgatagaagtgttccagcaatctgcagacctaaataataatgcctccaattctggcatgagcctcttcaacccaaacactattggaagtgttgatccaagtagcacaagacagaatggaataaagacattcttaaggtatttatagttttgttgggctaccgttgatatttcatatgtcacaatagccttgattagcataattcattttttattaagcttcaggaaatgtaagggaaataataacttacaagtgacagtttctgttactcagccaggtaggagggaaaagtggggtgagtgatgtcttggcacgttacattttttgttgtaggtccaggtacctcagtgacacagatggacttaagtttgatgtgtggtatctctgtctttgggtcattcactaaacataacatactatctatgtgtctttaatgatagttttgtacaaatacagtaatttgtatttcatcatgaaagacagattggttttcatgtcatcattttggtaaaaggtaaatagggggttttagaatttaaagatcgcttattccttagcttgaacacaatcccattgcatatcatcaccatgactgaaacgtatagtgttcatagagagaacatatggtgtttcatggtcagaaaggcaggatccatgagtcactgaaaacagtttacaatgcaaaaaatgccttcccagaagagcaccttttactcctcagcagatgtgggtataaagcgtaagcaaatgcctggtctttagcaaaaggagaaagtgcagacatgaaatgagaactctagtctgtgccttgtgcaccggtgtttgactgtggcatctgcatcgtctgtgagagcagaggcagctgcgttctcgggtgtaacgcctgtttctgattttagttcctctgaacgcaggggtgtgtggctggtggcccccctcatcgccaggctgccaacatctgtgcagggaagagtgttgaaagccgctggggaagagctggagaaggggcagcacctgggttcctcttcaaagaaggaaagagataggcagaagcagaaaaggtacgctggcaggtgcctcgcgtcaaggctggcatccgaaggacccggaggaagcctagaagcctccatcaaagtcacatcgcagccagctccacggggtggggcttgtagaacggccaactctctgtttagcaaggatctgtatagggcaccaggtcccatccctgcctgtgtgtccaaatcactgcaaagctattgacgtacacaggcttgttgttaattctgacctgctagaccttgaaataattactgattttcattttcttaatttaggaaccttgttgtagatttttgattaaaactagccataacaactgccaaaactatttcattatttcatgcccaagaaatggtttcacatcattgtttttgaaaaacagatcatctcgtattgaggatgaatattcatactatacatttgaaacccaagaagttttaaagagaaaggtcataatttcttcattctataaacttaaagatagagctaataatactaccacaactgagtgttctttattggctacctacagggctcctgattcagacattctggcatagacctgttctttaggaaaattttcttttcactatatcaatcagtttgaccaatgttctctaatgggagatatcttgttaacgtgaacattgtaaatagaattttgccccctttctagcggaggccatgggcagtgtcggggcctggcacacggtgttcctagcaagtatcttgctttttggaggcctcagaccttgttgtgctcccccctaactttaccaacactctgctgttggcctttgagaaatatacaaccaagaaacacaggcctcggaaatagtcaaggtccacagagagccgcttcctaaggaagagttttctctgagcaatctctccggtattttttgtttgttctttgttttgtttttctctgcatacatttatattctttgtcctgtatatttaaaaacttccccctagtaacagaaagcaagctcatcacataccctgcacgtttctgttgctttgggatttccttccagagcaatagagaattgtcatttaaaagctttaccagtggtttttaatcttgccagtacaggaaggtgtcaccttcccaaatgttctctggtggtttcccaccctgtccttcatgtagtcgtaaataaacaagagcagtgagtgagtctactagaaagagcagctgttgcagcaggggcaagccattttttctgactagctctgttaatacttcctttgcagtatgtctcttttgagccagcagcctttcctctcattggtccttacctgccttaaggggcaagatgagcaacgggaaggccttctaacatctctgcagaatcaagtcaatcaggtaaagcgtggagtactaaactcggccagtatctttctgatggtattcattatttcccttttgtgatttcatgatagtgtcctaatgtgacattagattaatgttctgccgctgagatgctaagaaacacagtccatgtcccattctgcctagcatcatggtcaccagaaggccagcaaagctgatgctaattatgcattgagagatatgtaaagactataaaagtaagttgttgcacactgcttagcagctagcttaccgatctctgttgcgcctaccgagaagcaaggaatcaaggaaagatgtcagattggttttgtgagttggattatcctgacacaaagccaggtgaaccctgcccggtggcattaaatgagagctgataacatgcacaatggcaccaggcttactcggtttcctttgtcaccacacccacactttggacaggtcttttctctgtctagcttccagagggagccatttaaatacaaagcactcagggttctcttcatacctagactacaaatgccagggctgaactgatagagccactcctgattgggcatttgctgtctcttccagtgggtttatcctttccttcaagccgctctgggctgggccagtgtcctggtttaggtgcctgagcacttccttcttttgttgcctggaaggatccatgtcagatgttaagcagacctgctctgcctttctgcgagtctcagttcaccttgcctccctttgtccttgccataggcatttctgtgtggcctttttccgtgtgtgtgtgtgtgtgtgtgtgtgtgtgtgtgtgtgtgtgtgtgtatgtgtgtaagactttcttctcccagctacccaggaaattataaaataactgggattttgtctgtctggaagaagaggaagagtaaaaaaaaaaaataactttgttaatgtttaagctaagaagtgttagctgttactgtagagcttcattttaaacctgtaaaagtcgtcatagcaaagaacaaagggatttctgttgttactctttgttttttcccaatcttagattttaagtaactggagggaagaaagataccaagatgatacgaaagcccgccagatgatgcatgaggccctacagctccgcctgaatctggtaaggatgtggcagacccatttctgtcacacctctctctgtgtgaaagtaataccagctttcaacatctgtggacagaatctgcatgacagagggaagccttcctctttctcactctgtacctacttccttttctcttaaaccttctgtttccttagctgccgtccttcctgtctgggttgaattctagacagtagagttgtaagcacctatttgtgttttccaccagggagtagaggctccgtctggcagatctctcctcctcctcctgtgcagtgctaaggggaggtccgacaaacctttaataggagtgttggctttcactgtgttctattttacaaccacagaaatctgtcaactctcaatttttctcagagacattctgttaaattgatcagaaaaaaaaaagacaaatctcacaagaatattttacagaaatctgaaagtttcagcatgttttgtattcccttaaatttcctcttgacaaatcctgaacgtgccctgggcaattgcttttctggcttttggcaatctgacctccctgggcagttgttcacctcaccttcagcactctgacctcctcccaggagctggcagacctgtggcaataccttctcctcctcattccttccacgttaaagggcatctccagggatattatagtggcaggctcagatgcaataataatcgaatatcacacaattgcaggtgatgagacagagttttgatgctattcaggtttaactgcagttatgtctaaaactaagtaccatgagagactgatgagaagagaaaggtaattttgtgactgcccacattcaagtgttacactttctgttaagttttgaatgcctagcctctgtggaaagaaccataaacagtgataaccacatagctagaagagacagttgtaggataatccatagtgtggctagcaagaaccagttcttaacatcacttctggtttaacaaatcaacatttgggcacatatggtaataggggtagcaatacaaaatctttatcatattttgtatgctaggtaggaggaatgtttgacacggtacagcggagcacgcaggggaccaccgactgggccctcctactcctccagataattacttcgggaactgttgacatgcacactaacaagtatgttgggtttttgttttgttttattttgttttttatcattttatacctttttttttcccctgcatgcatgcatggtacaagcttttgtctactgacaggaaattctgccacttactgatttagctgtcattaaaaacttagcactttcagtagaaatgcttaggcaattctgtgtgtccgggttttgtttgtgagaataaaatggggttttctttcttctcagtgaattattcacaacggttcttgacatgctgggtgttttaatcaatggaaccctggcttctgacctatcaagtgcttcccccgggggatcagaagagaacaaacgtgcatacatgaacttagtaaagaaactgaaagtaagcttgtgatcagcctctactctgaaatcatgttgtttatggattattgtcttaatttcctcctcattaatctacatgtgtagctgattcagcagattgtggttatttgttatcttacctactctgtcagtccttcaaaattacaagcatgatatttgaacgatttttttctctgaaaaggtgtgctcaaataaaatgtgttttaatttttaaggattttaaaaatgcattatcagatatctaaccaaaactccagtgtcagatttcctttgaacccatgcttggatttacacatgcaagtgggaaaaaaaaaaatgagctctgcattgaatttgtaaatccactaacagtcctggacatgaacggcaaatagacattgcaaatacataatctgaagacgttacagtaaaaaagctgatggttaccttgcactgtgaccctggatacgggaaagtgtccgtgcggcagctcctgctgtgtgacagcaaatgacactggcgttttgtcatttcagcactctgatttgtcatggagaacaagactgcctttgtgtgcaccctgattttctacttgaatagaagaaatgaaacatttcaccagtccaatttgcagctgttccatagactgcgctaaggactaaagacatactagccctaaaaaaaaggaaatgtgtcactggggaacttccttcttgttagcttttgcttcattgtaaagtcagaatttttgcctcacttctctcttgcttttacatttttcccccctctttcttctagaaagaactaggagacaagaggtcagaaagcattgacaaagttcgacagttgctgcctttgccaaagcagacctgcgatgtcatcacgtgtgaacccatgggttctttgatcgatacaaagggaaacaaaattgctggatttgactctattgataaaaaacaggcaagagtaaatgttttttcccacatatataaatatatctagttatagaagccaagtgacttttcttaattttcagtggtataatttttgtcatcaaagcacaatagctattggcattgcaaaaagaaaaagaaaaaagccattatcttcaaagatctcccaattaaaatgcttatctggacttcagggcatttctagaatctaccaaaaacttaagtaacagcttagcataagaaataaaagtaaaataaaattattattttacatcaggataggaaacaagctatgtttatataagaaaatgtgtgctgataagaattttcatttgctgagtaagcagtatttagtaaaacttgtgttacaacactacgtagtctctaagaagcagtattagatgggcatttgctttctatacaacgctttggaaggttctttaaaataacagaaaggccagcctgagtagccattggcactgcagcaatggagatggtggagggaatccctgcccttagggggaagtagatgcacttttacatgcaacgggacgtgcaggtcaggtcatgatggcaccaacggggaacggtttaagtcacacaggcagaggtagtcagaacaggggtcctacaatagtggacacacagaccatcctgacggactaagtatacagaaaagtataggacaggtggggaaagtttaaggaaaggcaagaaaggtgactgttaagaggaaaaaccatgccaccagaattcagagttaactcaaatgccatagcagtgtggccatgggaggggaaaaccagaagtcacaataagggtgacttgggcttctttcagaaggcatccaggagccatttagatgtgagttctactcaggagaacgatttcatcacatggcagacagcagtgggtggtgacattactggtagtgtcagaagaagtcacacttaaagaggaagacagacaaaaacagatatgctcacatggggggcggggtaccttggccgttttgaggagaaatgtctttaaataggtatacttgcaaaattactaagaaatgttacccattagtattacaaataaaagcatgctatttttcagaaacaaaattgaattccttacctggattcagtaaagataccttggaattgaaagacttaatttgtgttgtacctgtttctgtaattaattttctcccaaaaaattttattcagagaaagccacatacatgtacatgaaatatatactaaattgagttcatacatcagaggcagactatatattgacttttaaatcttgtataatactaaaaataatggattcctgagatggttctaacagcaactttacaggatacttgagagattatattttctacaacatacttgaatgagaatgtcattttatactaaaatattttagctcacttttagatgccttaaggagtgtcaggtggtacagagcactggagaactgaacttgcaaagtcctgaaccccagttcacactgcttagatgaacattcctgtctactgagttcccttagctcgttccaaccttccaaccgcacgctttcaagcttgccctgtgggttggggacaggccaggttgtgttgtcacagaacattcttttcccacagggtctccaggtctctacgaagcagaaagtgtccccatgggacctgtttgagggtcagaagaacccagccccgctgtcctgggcctggttcggcactgtccgtgtggaccggaaggtgatcaagtatgaggagcagcagcacttccttctgtaccacacgcacaccatgcccaagccccgaagctactacctcgagccgctgcccctacctcctgaggaggaagaggaagaactcacgtctccagtttctcaggaaccagaaaggaaatcagctgagctgtcagatcaaggaaaagctacagctgatgaagagaagaagacaaagggaaggaagcgtaagacaaaatcgagctcacgcatcgatgtgagtggggggtgtaaggaaaagacggggtcatgggcacctagtgtgggatttacctacggccgaactctacacctagaaacattacaaagaatgctagcagctttcttacgtagagtttcctaacaagtgtctgtactaacgaatgaattctcataggtgacaggtagaaagcttttcatttcccactgaccacttttttggggggtgggggtaggggtttttggaggagatgtgggatttgtttctacataaccccagttgccctggaactgctttgtaaaccagcctggccccaactcagagatctgccagcttctgccacacctggttcactctatgcttttaacttcaaacttcagtaatgagtaatattattgagttaataagcttcataatttccccgggtttgaaacttttaaagaagaatatgattctactttcttaagcacctttattaataagtatgcctaaatattttattttgaacaattggtgtttgcagtgaattaacattttagagttccttctacttttctctgaatgaatttctatctgatttacccaaaaggagtgatcctaagatttcgttctttgccattgtatcaaataccccccctgttattctttaacctattttcagattttataaagagataaaataaacctagtgtaaaatcatctctcactcttcctctcactttttaaatacttgatatctactagataattcagaaattattttattgtatatgagatgcattatttaagatagctttcttatttgaaattatttgggtttcctttagagaaagtttcagaacattttctgtagaatgcaaggatgttcttgattggcagagaggaggcactccgcagagttcacgagcagttgtccttacatttacctgtgccaacactgaattgtgcttattcttggaggatagcttggtgattaatacttttagagatggctgctgtcactttcagaggccacttcagtactagtgccttctctcaaacctgggactccctggctctccaagccacatggctgagggtgacttttcacatgcaaaagccttacctaaatatatttacagtcctcctcctgaagttacctcttcctggtcagattacatctttttgtaaaatcaaaggatactgggaatttcattgtccttcatcctctagggccaagctagagaaaggatgggtgatgagggagttgagactttctggtatgatctttgggtctgtgctatgaggagaagaaggcacttggggaatggctattttaagtgctgctttgaaaattgtgggtaagatacgattgaggccttgatatgatagcactatggggttttcttactcagttcttatcctaacccatggtaaggccttccaagatgaggccagcaggagactgcagccgttgtcttctttcagttataggcattgttcagtgttagtattagataattcacttcgatattattatcatcatcatcatcaatgtctgctgtaaggaacatacttttttctttctttttttggtgattttggtggaaagatggtaacatagattgaagttagggccttatatgtgttaagtgaatattattgagctaagtactttttaaatcaaagaaaaaaattaatttgaatgagcatttttaaggaaatgggtcaccatttatattctctcccctttcatacaaaaatagccttgagttctgggacaggatcatctcacgtaactgaataagaagaacttatattgattaatcatgtgtggcatattcaagttaatttgtttcttaacgtttctgttgaaggagtatcaacagaccaacttataccgagtgcctcccaattactcccccatgtcctcccaaatgacgcatcatccgcaacctgcactgtggggttacaacctggtgagccagcctcagcagcctagctttttcctccagaatccgtctctgaatccaggtgggtatgagacaggtaacaccgagagaccattctgagcagcgacgtgaggttctccttgcttataacctttatcctctacaggatgggggtttctggtactcgattcacattttcataacccacaaccctaacaatttgtttttcttctccgagattagatgaggctgcagctagacccagtggcgtgcttctgttgtctcagctactacagtagaggagaataggacaggaaaatcactgagcgttggcaacatagcaagagcttgtctccttaaggaatgttcataagtagctgattacaggcatggattgtagaatttgtcagaaggagattgagctgcctaaagtctgagctactagacataaagttgataagtctcatgtttataaaacgtgtgtatgtttttattggctgtaattcccatgtgtgttttaaaagatcagacagtattgtagcttccctttcttacattgtaaactttaaaatggaatcatagagcagctcagaagtttggtttggcaaggagagtcacatactaacacacaaaactaccacatccatagtaattattcctgattatagtcgtgtttggttcaagccccaagtatatcttgtaatgcaaatgaatattttcctagatagaaatatttgctaattagaaattagtttaatgggaaaattttttaaaggatgaaaaaagtttaattttatgcacctgcagatatgtgcacatataactatgttcataacttttacctatatatacatacatgtgcttttacatgtaatggaaaatatgtttatagactttatgccatggctcacacagtaggcaggttcaggacatgagcttaccatctcctaggtccttgatgctttataagcagacaggttctcccatctacagaattcatcacctgcctccaaaggctctattctgatactactttcacattgatgtccaagatagcccaccagtctgttcaaagttgtaagatttaccctcctgctggtctgtgtttctctccccttctttctgttgtatagcatcagtagcttgaatggcttccttggtcacttgtcttcacactccagactgtaaactctatgaagatgggtacttttgctcttgtcttcacaatgatgtccttacaagttagaacagtgacccagtcttaaaaataaatattggtgatgcatgcctgtaggtattcaggaagctgaggcaggaagatcacctgagttcaggacttttgaggctgtataaaatgacagccggtgagtccttttatccacaagcacacacctggaagcagcaggtaacaacttaaacaagtactgggtccctgagagcaggtcagaagatttgccagtatattaagagggttagggttaagggtcccgggtttgaagtctaacatggaatactggtcaaaagactgaggaggaaaaagattcacgtaatggtgggaggcatttgccaggagcatcttcttcactgacacagcctgaagagacagagagcaattgcaatggttagattggtttatatcagctatcagcaagtctggggcttactaattctgcaagacctcctgggttggtgggatactgctcattttggaggagtttacaggcctcagttggttgctgggtagtgtctgctaagtggaaatcttcttagacagatatagactatggataggagataaagttaagaacgtagggggaaaatatttatgttgcttatacacttgaaacttccagacccatggtcctggacctatagtcagggtagtggtcagaagaagtctgaagaccctcctggggaaggaaagagcccaccctcagggataggtagcaggcaaaaatcttaagctgttgactgacaggagttcttatctagagttcattttgacctgttacaggtggaacccagtcaggaatccctgaagctcacataaaattattgaaaagttgcaaaaagagatgaaagtttaaaatatgttagtattatcactgtttgtgatctgtactgaaatcctctttgtagaaaaagcagcagctaacaagtatctataaacagctgcagtagactcatgcttttgagccatagcaagagcttgtgtacctagagggatggttttgggttaaaagcattgtcttagtcagggattctattcctgcacaaacatcatgaccaagaagcaagttggggaggaaagggtttattcagcttacacgtccatactgctgctcatcaccaaaggaagtcaggactggaactcaaacaggtcaggaagcaggagctgatgcagaggccatggagggatgttccttactggcttgcttctcctggcttgctcagcctgctctcttatagaaacaagactaccagcccagagatggtcccacccacaaggggcctttcccccttgatcactaattgagaaaatgccccacagctagatctcatgaaggcatttcctcaactgaagctcctttctctgtgataactccagctgtgtcaagttgacacaaaactagccagtacaagcatgaacactcatatcatagatagatagatagatagatagatagatagatagatagatagatagataatgacaaaagttttcagcacagtaggagatagtttttggtttctatttagaaaacaaaggaaccttaaattttgagcccttgactatgataacagtagccagtgctgtaccaaggctagattaatagtttatcagaattcctctgatcagttatgttaaactcagaacttttgaagtcttaacatcagataacatctttaagtcttgtgtttcacatgccttaaatcgcttcctcagacctcctcagcctgcatttatatatcttaaatcaggtccttagactttcacaacttagatttacatacctcagatcatttccttagacattcacatctttcacccatgtttctgaaatcacttcctagacccacacagcttgtatttacctatctcaaattacttccctggacccttacaatttacataaactttattcaatcatttaccatgcgacccagggggttgattactgagagcagtcattgaaaagcaagttcatttaaataagggaaaatcgtaaagagtagatttttagttagagatagtagtatgatatctggagtttgtttttacactgaagtttgttgtgggagtctcttttttactgtgtagcctgtaagagaggtaaaactgtcatgtgtctgcctttctcagcaggagacctagttgctctggtaaagcaagacctgatttttttacatctgaaacagattgaccagccagccagctgcagacttgcaggggggtggaactcactaaaaagtaggcttactgctgctaaactgatgaagctcaggctagccatcaacaccatcacaggtctgagaaggataaatttgagcacgaatataatctaagtggcctctgtattggttaaaatggcagagactaactggactgacagcctgaacttgtccatggtgatctctatgacttgcttggggtcaaaggtcaccaatttttgactatcacacaggacaacatcaagtcttcagctaccagacccagaatatttgagagattttcctatggaggacaagcctgggaaaactgacctgtcttggtgacgttgagtagagcagtcagccagctctgtccccaacttgggcagcatccaggtggcaagcaaggcatccgattgagcagctctttgcccagtagtcattattacttcgctccagttggagctccttgctaaccatcttctttggacacctacgcttgttctctgtgtacataaatatgaatgatttaagaagccgggtggtggtggtgcacgcctttaatcccagcacttgggaggcagaggcagacagatttctgagttcgaggccagcttggtctacaaagtgagtgccagggctatagagagaaactctgtcttgaaacaaacaaacaaacaaacaaaaaagaaaatagtgaatattaagtactaagtttaaagtaccactctgtagacggtaaaggtcacctagtagaaatgcacggaatgttttagacagatttgtaacaatttggttttttggttggctcaagtgcaaggttatagaagactttaagaaaagtaagtagggtgcagtctggtttccaggtttccttaaggaatgcactgtccttagcttagtactgtggattggtagtagcatttcatatctgctgcagtcaagttacctcgacatagttactcagttactatcattttcaaatgctcttcctatgcctgtgaatgactgatgctcatattgttaactgtggtgatgagtttgaaagatgcctcccaggcaagcagctataaaatacttctctgtcatacatattgctttagagtaagaaggaaggaaggtgggaagataggaaggaaggaaggaaggaaggaaacatcttttgagagatatgtgcgtagagtttttctccttagtatgtatcaaggaatagagacaatctctgagggaaggattgtcatttactataaagcctccaattatacaaatacgtttttctaattcataaaggccttaacaaattgtagatgcagaatctttaggattttttttttaagtctcttgagtaaccatgatcaaagccatgtttgtagattttgaagttttcgaacatttcaaatttccaaagtgttttcatttttgttttacaaaatagacattttctttatttttaatatattttaaagtaaaattacatgactttcccttacctttccttgttccaacccttgtctctcctcacttggtctctcccatgttccctccctcttattaccttctatcccatgtcacctccacttctcaactgatggcccttttctttgttctttgattattattgttccacagcacagatataagcgcagcattgctgagtccatcttcattgttcgtgtgtacatgatttcagggctgaccattttataacagataactagttaggcgtctcaatcctgagaatgagtccttctccctcccctccctctcacagccctgccttgcctctaattcttttttttttcctaatttatttttttaattaggtattttcttcatttatatttcaaatgctatcccaaaagtcccccagacccttgccccaccactcccctacccacccactcccacttcttggccctggcgttcccccttactggggcatataaagtttgcaagaccagggggcctctcttcccaatgatggccaactaggccatcttcttatacaaatgcagctagagacaggagctccagggatactggttagttcatgttgttccacctatagggttgcagacccctttagctccttgggtactttctctagctcctccattgggggccctgtgatccaaccaatagctgactgtgagcatccacttctgtgtttgctaggccccagcatagtctcacaagagacagctatatcagggttctttcagcaaaatcttgctagtgtatgcaacggtgtcagcatttggaggctgattatgggatggatccctgggtatggcagtctctagatggtccatcctttcatctcagctccaaactttctctctgtaactcctttcatgggtgttttgttcccaattctaagaaggggcaaagtgtccacactttggtcttcattcttcttgagttccatgtgttttgcaaattgtatcttgtatcttgggtattctaagtttctgggctaatatccacttatcagtgagtatatatcatgtgagttcttttgtgattgggttacctcactcaggtccatccatttggctaggaatttcataaattcattctttttaatagctgagtagtactccattgtgtagatgtaccacattttctgtatccattcctctgttgaggggcatctgggttctttccagcttctggctattataaataaggctgctatgaacatagtggagcatgtgtccttcttaccagttggggcatcttctggatatatgcccaggagaggtattgtgggatcctccggtagtactatgtccaattttctgaggaaccgccagactgatttctagagtggttgtacaagcttgcaatcacaccaacaatggaggagtgttcctctttctccacatccttgccagcatctgctgtcacctgaatttttgatcttagccattctgactggtgtggggtggaatctcagggttgttttgatttgcatatccctgatgattaaggatgttgaacattttttcaggtgcttctcagccattcggtattccttatatgaaaattctttttttagctctgagccccattttttaatggggttatttgattttctggagtccacctacttgagctctttgaatatattggatattagtctcctatctgatttaggactggtaaagatcctttcccaatctggaggaggcctttttgtcttattgcctctaattcttgtggatcccatgagatgctcccccatcatggttgttgaagttgtcattgttgggatcgtgtgtaggcagctcttttaggagatactatctcagatcagatttcctcatcctctgcctcttatgatccttcctctcttctgtgatgttccctgagccttaggtacaggagttgcattggagatgtatctgctggggctggcctcccccagtctgttaatgtcttgcattgtattcagtgatatttttctgtgatgtcactttttggtgtatggaaggcgtctttgatgaaggttaataaggactctcgtctgtgtgtataaggaaacgatttagaatgtagcaaggatgtataccggtctagtatgtcctcttctgagatccactgattgttggcttgattttgagaaccaggtgctatctctgttcttacaaccaacagctactgataaccaccaacatattaactccactcttgtacctttgcagttatcttggcatggtggtcactattgtggttaataggactttctggtgctatggaggttggaccacaggaagattacattcaggttgagtcctccgagtgctatgttctaaatcttcatctcttgagagataactagggccaattgcaatggcttatttggtttgaagtcattttgaatgccttttccaacaagttgagtggagattttcatacctggaattagggtatttgttagagtctgtggatcttgtggggagcattgtcagcctaactgacataatgtaagtgataagttatttctccactggtgaaatgagccagttcaagccagattagattatattaaatgcaggtttactgggaagctcctggacaggggtattcacaggccccaaggaaggaggccagggaattcttgaggagaggaaaggaggaagagagagaaagaaagagcatgcatgcagagagaaaaggagagaaaggtgagaccaaactgtctagattacacagggaagagcctctgggggaagggaaacccagcccttgggctggaaaattcattgttggtggtggggtatatgccaggtagggactccaggatgctgggagaacctggaggccaggtctgctttggcatgtaaaataagcacctcagtcccttgtcccggggtctgaaaacaaacattaagctctgtgtgtgtgtgtgtgtgtgtgtgtgtttgttgggtgtgtgtaaccgagaaggtacctgtgatatacatatcacaagtgtatgcatatatgtatatatgtatatatatatgtgtgtgtgtgtgtgtgtgtgtgtgtgtgtatgtgtgtgtacacatacacacaagaaagtattatatgtaattttaggtaaagattataagctaacatgattctttgagactttatcaaacagcctcagtgctatttgaccctccttcatcttccttctcccattagaggctctttcccattttctccatttccaaattaggccttttaattttgccacggtaaaggattaaataacacagcctttagatgtgtttataatacagatggatgctacgcctggcttatgaaacttaggaaagtacagtgtaaggcactgtttccttcaagtaatacgttcctgagtggtgtgcatggcttttgacccacatgaccggcgttttgtgctgacccattttgtttcaggcattgcatttgatccactgaagtgcagcccccatgtagcagttttgcagtattcacacacagcattgccttttatcttagggacattaggcagctctaagcaggatatcaatgcttggagctagtagggcagtatcttattttctgtcttgctcataaagtaagaaaggtgaaattcctgtgttgtcctggaagaatacctgctgcatttgaaagacttccttttggttgcttttctaggtggctcccgattggaccctgcgggctcctttgtcccaaccaataccaagcaagctttgtccaacatgctgcagagacgctcaggcgccatgctgcagccaccctcccttcatgcagtcacgtctcagcaacagctgctacagatgaagcttctgcagcagcaacagcagcagcagcagcagcagcagcagcagcagcagcggcttctcaggcaggcccagactcgacctttccaacaggtttgttcagaaccagccttggcatcctccttacatggtcctctcctctagctaggtgtggtgcataatcttgctatgtgcatatctctgtacatgtgttatacaggtttgcgaatattcttcctcttttgtagttcattattgatcttgggaagaagcccaaagtgctaaggactctcattcattcagatgtcggcctcttcctttgatgtgactctcccaacctccattctatattataattactacagtgttttgtatttattttatcactccttatatgcatatcctcacatgtatttctttgattttgtgcctctaatgtcatgatgtttttccccttcattgttttaagcattcattcaataaggtctgtatcaggcaacaagcaaattataaacagtggtccatatatggaattcgtatacgtgtgtcaaatgctggagatggtacccagaacctcatacgtgatgggtaaacactttacccatgagagatgtgcctactgcatgaatattgagggtagtttgtgcttgtttgcttaggtttgtttgttttgttttgttagtgttttgagacagggtctcagtatagagctttggctgacttggatcctactgtgcaaaccaggctggcttcagattcagagatctgcctgcctctgccttctgagtactgggaataagagaatgcctcaccgtgtgccctgcttttgggtttaattttttgattgatattctgatttctatgtcctgtaattcactgctctccctagacagtgtttgtatggtaaacacagtggccatgatgactggtgcctaccttgacatagacacatgaaacctgtagctctgtacaagtacagttgaggacaagactgtagtaggattgcagctgctttttctagtttctgaacattttctgtattttccagtctcgctgttgtgataatagaagccagcagagcatttactatgctgaaccagccatgcacactttaaatgcattagttctttagatcccacacaaccatgtaatgagtgcgtacctctgtgaccttaagtgcgtcagcccggctgcaggtgtcctgctctaagcaaaacaggaaactttacaataaccgggattctagggctcttgacttaccccactcctgcctttgcatcctggtgcctgtgtgactgagtatgtcttcattgctacctggcgacaggaagatgaggtgaagagaccccttatgcactcttaaaagttgtctttttaaaactgctctggaaacgtgaggatgttaagcagaggttatcatgggcttgtttttccctgactctgtcggctgcataaactccatgcatatcaggtaagatgagcagagtcgctctgtacacataactgatgagaagtggaataaaatgcttaaaaaaacataccaatttggcttaaataagcaagatgtttggagctgttaaaaccctctttgaggtttttagctgttctttcttggagagtaagcatacacacacttgttcttgcttcaaattcttttttattttaattatttatttttattttatgtgcactggtgttttgactgcatgtatgtctgtgtgagggtgtcagatcctcctgaacaggagctacagactgttgtgagctgccatgagggggctgggaattgaaccctggtcttctggaagaacagccagtgctcttaaccactgagccatctctccagcccatcttgcttcagatttgcttgctcttttagcacaaccccaaacttgtcttacttgcagcttactttcaaaccgtcactgctgaacttagctttgagttgccactgaaagtggttctgagctctggaggaaaggtcaggggcatacgggtaaccatggcaactaaggagtttaatgagacagagtcatcaaaggccttcctctcagcactcaaatagacctcagtgacttttgtctcctgcagagttgtgcagattaaatgcactggagctgatggcccatctgtgttttcgtactaattcttctaggccagtgctttggttttgttttgctttcttcttcatctcaattgttttatccttcatagtcctatatgtcttcatcagataatcagtttcatagcatcagcctgctcctcataattctcccccaactaaaaacagttttgaagttcccagagcttgcctaacagataataagctcttttatgtcactcttcttcatgtgctggctagtggaggaggatatgaactctactgcagatcaagcctaggccttggtgtaacagcgtaggcaagtgctttaccattgagctaaatctccaagccctctcagaagaaagaagaaggcatagttatgcagccatatgggcggggacccttcagagtaaacaaacaagatacacatggcatgatacacatggtgagctccccccccccccccgctctttataagtagttgtcttagtcactgttctcttgccatgaaggtacaccatgaccatagcagaggaagtgttaaactgaggcattcaggcagacagtgctggagaagaagccgagagttctatatctggaccttcaagcagtaggaagactgccactgggtgtggcttaggcttctgaaaccccaaaaccttacccccagtgacacacttattccaacaaaggtagacatactccaacaatccttcctaatctctctcaggtaccagcactccctaatgatgagttattcaaatataggagcctgtaggggccatttgtatttgaaccacccacagttatacttgttattaatataactggaatgtagacaaatatgctgtggtgggaaaaagaatctccttttggtaattacttgaaatcagtggtagaattgtgtgaaatataagtcatatgggtaacttggtagagtgtatcatgctggacacaataggcttttctaagcactaatcatttcatgacaaaataatagagatgttgattctaacttggaaggaatgctttctcaggttaaatgcccgtacacggagtcacacaagagctagtaatatttttggatttgtgtcccccagcaaacttttttcacttcttgaagataacaatatgaagatataatatgggactcctttataaacctctttggcaaggaatctattttttcctaggtgtagatatattgagatccttttatagctggtcttggaattttaccagacacttccaggctccactgtggctgtttctgctgccatgcttgttggcttatcttacagggttaggcattgggccttagtgtcccttttaccaccaccttacctactgaggacacatcggaagcctaggaagtgttaaataaatgcatacatgatctaaggagccattctcaggcatctacagcttcccaatagacttaccctcagctgtgtgactgccacccacacaatccagaagctatctgggtgcttctggaatgacctctgctgtggccattttgaagcctaaatgcacagaagagacagaagtttgaggtctgtaagtatctcagtccttacagagtgtctgcagcctctttccttccaacaaagagaatggtttatgcagaatcctgctgcttacctgatacaaggttaaaatagaataactttctagtccccctgtacatcagataggaacttcagtcagccatgtgattttctgttcaggcactaatcccaagattcaagagaaaagaaggaccaagaccacgattatacaaattaaagcaagatgtatttggctgcacttctgattggccatccagttgtctccccctcagtcagggttttcttttcttttttttttttttttttttttttttccattttttattaggtatttaactcatttacatttccaatgctataccaaaagtcccccatatccacccacccccacttccttgcccacccactccccctttttggccctggtattcccctgtactggggcatataaagtttgcaagtccaatgggcctctctttccagtgatggctgattaggccatcttttgatatatatgcagctagagtcaagagctccggggtactggttagctcataatgttgttccacctatagggttgcagatccctttagctccttggctactttctctagctcctccattgggagccctatgatccatccattagctgactgtgagcatccacttctgtgtttgctgggccccggcatagtctcacaagagacagctacatctgcgtcctttcaataaaatcttgctagtgtatgcaatggtgtcagcgtttggatgctgattatggggtggatccctggctatggcagtctctacatggtccatcctttcatctcagctccaaactccgtctctgtaactccttccatgggtgttttgttcccaaatctaaggaggggcatagtgtccacacttcagtcttcattctccttgagtttcatgtgtttagcaaattatatcttatatcttgggtatcctaggtttggggctaatatccacttatcagtgaatacatattgtgtgagtttctttgtgaatgtgttacctcactcaggatgatgccctccaggtccatccatttggctaggaatttcataaattcattctttttaatagctgagtagtactccattgtgtagatgtaccacattttctgtatcccttcctctgttgaggggcatctaggttctttccagcttctggctattataaataaggctgctatgaacatagtggagcatgtgtccttcttacctgttggggcatcttctggatatatgcccaggagaggtattgctggatcctccggtagtactatgtccagttttctgaggaaccgccagactgatttccagagtggttgtacaagcctgcactcccaccaacaatggaggagtgttcctctttctccacatcctcgccagcatctgctgtcacctgaatttttgatcttagccattctgactggtgtgaggtggaatctcagggttgttttgatttgcatttccctgatgattaaggatgttgaacattttttcaagtgcttctctgccattcggtattcctcaggtgagaattctttgttcagttctgagccccattttttaatgggggttatttgattttctgaagtccaccttcttgagttctttatatatgttggatattagtcccctatctgatttaggataggtaaagatcctttcccaatctgttggtggtctttttgtcttattgacggtgtcttttgccttgcagaaactttggagtttcattaggtcccatttgtcgattctcgatcttacagcacaagccattgctgttctgttcaggaatttttcccctgtgcccatatcttcaaggcttttccccactttctcctctataagtttcagtgtctctggttttatgtgaagttccttgatccacttagatttgaccttagtacaaggagataagtatggatcgattcgcattcttctacatgataacaaccagttgtgccagcaccaattgttgaaaatgctgtctttcttccactggatggttttagctcccttgtcgaagatcaagtgaccataggtgtgtgggttcatttctggatcttcaattctattccattggtctacttgtctgtctctataccagtaccatgcagtttttatcacaattgctctgtagtaaagctttaggtctggcatggtgattccgccagaagttcttttatccttgagaagactttttgctatcctaggttttttgttattccaaacaaatttgcaaattgctccttccaattcgttgaagaattgagttggaattttgatggggattgcattgaatctgtagattgcttttggcaagatagccatttttacaatgttgatcctgccaatccatgagcatgggagatctttccatcttctgagatcttctttaatttctttcttcagagatttgaagtttttatcatacagatctttcacctccttagttagaatcacgccaagatattttatattatttgtgactattgagaagggtgttgtttccctaatttctttctcagcctgtttattctttgtatagagaaaggccattgacttgtttgagtttattttatatccagctacttcaccgaagctgtttatcaggtttaggagttctctggtagaatttttagggtcacttatatatactatcatatcatctgcaaaaagtgatattttgacttcctcttttccaatttgtatccccttgatctccttttgttgtcgaattgctctggctaatacttcaagtactatgttgaaaaggtagggagaaagtgggcagccttgtctagtccctgattttagtgggattgcttccagcttctctccatttactttgatgttggctactggtttgctgtagattgcttttatcatgtttaggtatgggccttgaattcctgatctttccaaaacttttatcatgaatgggtgttggatcttgtcaaatgctttttctgcatctaacgagatgatcatgtnnnnnnnnnnnnnnnnnnnnnnnnnnnnnnnnnnnnnnnnnnnnnnnnnnnnnnnnnnnnnnnnnnnnnnnnnnnnnnnnnnnnnnnnnnnnnnnnnnnnnnnnnnnnnnnnnnnnnnnnnnnnnnnnnnnnnnnnnnnnnnnnnnnnnnnnnnnnnnnnnnnnnnnnnnnnnnnnnnnnnnnnnnnnnnnnnnnnnnnnnnnnnnnnnnnnnnnnnnnnnnnnnnnnnnnnnnnnnnnnnnnnnnnnnnnnnnnnnnnnnnnnnnnnnnnnnnnnnnnnnnnnnnnnnnnnnnnnnnnnnnnnnnnnnnnnnnnnnnnnnnnnnnnnnnnnnnnnnnnnnnnnnnnnnnnnnnnnnnnnnnnnnnnnnnnnnnnnnnnnnnnnnnnnnnnnnnnnnnnnnnnnnnnnnnnnnnnnnnnnnnnnnnnnnnnnnnnnnnnnnnnnnnnnnnnnnnnnnnnnnnnnnnnnnnnnnnnnnnnnnnnnnnnnnnnnnnnnnnnnnnnnnnnnnnnnnnnnnnnnnnnnnnnnnnnnnnnnnnnnnnnnnnnnnnnnnnnnnnnnnnnnnnnnnnnnnnnnnnnnnnnnnnnnnnnnnnnnnnnnnnnnnnnnnnnnnnnnnnnnnnnnnnnnnnnnnnnnnnnnnnnnnnnnnnnnnnnnnnnnnnnnnnnnnnnnnnnnnnnnnnnnnnnnnnnnnnnnnnnnnnnnnnnnnnnnnnnnnnnnnnnnnnnnnnnnnnnnnnnnnnnnnnnnnnnnnnnnnnnnnnnnnnnnnnnnnnnnnnnnnnnnnnnnnnnnnnnnnnnnnnnnnnnnnnnnnnnnnnnnnnnnnnnnnnnnnnnnnnnnnnnnnnnnnnnnnnnnnnnnnnnnnnnnnnntatttttgtatctattgaggcctgttttgtgaccaattatatggtcaattttggagaaggtcccgtgaggtgctgagaagaaggtatatccttttgttttaggataaaatgttctgtagatatctgtcaggtccatttgtttcataacttctgttagtttcactgtgtccctgtttagtttctgtttccacgatctgtcctttgaagaaagtggtgtgttgaagtctcccactactattgtgtgaggtgcaatgtatgctttgagctttactaaagtgtctctaatgaatgtggctgcccttgcatttggagcgtagatattcagaattgagagttcctcttggaggattttacctttgatgagtatgaagtgtccctccttgtcttttttgataactttgggttggaagtcgattttatccgatattaaaatggctactccagcttgtttcttcagtccatttgcttggaaaattgttttccagcctttcactctgaggtagtgtctgtctttttccctgagatgggtttcctgtaagcagcagaatgttgggtcctgtttgtgtagccagtctgttagtctatgtctttttattggggaattcagtccattgatattaagagatattaaggaaaagtaattgttgctcccttttatttttgttgttagagttggcattctgttcttgtggctgtcttctttttggtttgttgaatgattactttcttggttgttctagggcgtgatttccgtccttgtattgcttcttttctgttattatcctttgaagggctggattcgtggaaagatattgtgtgaacttggttttgtcgtggaatactttggtttctccatctatggtaattgagagtttggccgggtatagtagcctgggctggcatttgtgttctcttagtgtctgtataacatctgtccaggctcttctggctttcatagtctctggtgaaaagtctggtgtaattctgataggccttcctttatatgttacttgacctttctcccttactgcttttaatattctatctttatttagtgcatttgttattctgattattatgtgtcgggaggaatttcttttctggtccagtctatttggagttctgtatgcttcttgtatgatcatgggcatctctttttttatgtttgggaagttttcttctattattttgttgaagatattagctggccctttaagttgaaaatcttcattctcatcaattcctattatccgtaggtttggtcttctcattgtgtcctggattacctggatgttttgagttaggatccttttgcattttgtattttctttgactgttgtgtcgatgttctctatggaatcttctgcacctgagattctctcttccatttcttgtattctgttgctgatgctcgcatctatggttccagatctctttcctagggtttctatctccagcgttgcctcgctttgggttttctttattgtgtctacttccccttttagttctagtatggttttgttcatttccatcacctgtttggctgtgttttcctgcttttctttaagagcctgtaactctttagcagtgctctcctgtaaatctttaagtgacttatgaaagtccttcttgatgtcctctatcatcatcatgagaaatgtttttaaatctgggtctagattttcggttgtgttggggtgcccaggactaggtggggtgggggagtgctgcgttctgatgatggtgagtagtcttgatttctgttagtaggattcttacgtttgcctttcgccatctggtaatctctgaagctagctgttttagttgtcactgttaagagcttgttcttcaggtgactctgttagcctctatgagcagacctggggggtagcactctccttagtttcagtgggcagagtattctctgcaggcaagctctcttcttgcaaggcaggtacccagatatctggtgttcgaaccagactcctggcagaagttgtgttccactcactagaggtcttaggatcacgtgtggaatcctgtgtgggcccttgcgggtgtcaggcgactcagctggcaaggtagccggggctcgagtggagtggaaggggtttgtgccccagatcaagcccgggtagcctgcttccctatgtaccgcagtctcaagttccacgcgattggattggggtaggcgctgtgttccactcaccagaggtcttagggtcccgtggggagtcccgtgtgggcccttgcgggtgttgggcaagactctgctgtcaaggtagcccggggctcgagtctcgagtcgagcggaagggacttgtgccccagatcaggcccgggtagcctgcttccctatgtaccgcagtctcaagttccgcgcgattggattggggcaggcactgtgatccactcaccagaggtcttagggtcccgtggggagtcctgtgtggacccttgcgggtgttgggcaagactctgctggcaaggtagcctggggctcgagtctcgagtcgagcggaagggacttgtgtcccagatcaggcccgggtagcctgcttccctatgtaccgcagtctcaagttccgcgcgattggattggggcaggcactgtgatccactcaccagaggtcttagggtcctgtggggagtcccgtgtggacccttgcgggtgttgggcaagactctgctggcaaggtagcccggggctcgagtctcgagtcgagcggaagggacttgtgccccagatcaggcccgggtagcctgcttccctatgtaccgcagtctcgagttccgcccgattggattggggcaggcactgtgatccactcaccagaggtcttagggtcccgtggggagtcccgtgtggacccttgcgggtgttgggtaagactctgctggcaaggtagcccggggctcgagtctcgagtagagcggaagggacttgtgccccagatcaggcccgggtagcctgcttccctatgtatcgcagtctcgggttccgcgcgattggattggggcaggctctgtgatccactcaccagaggtcttagggtcccgtggggagtcctgtgcggacccttgcgggtgttgggcaagactctgctggcaaggtagcccggggctcgagtcacgactcagtcagggttttcaagagcagccctccactggcctcttggagttcttcttataagatgttcacaggtggcagaagggtcggtggttattcactgttacaaggatgcaatgaaaaggaagaaacaaagtaaatgggggcttgcaagtagccacaaaggcaaaaatagacatcagtgaatggggataagtggcagtctatgtcagaccagaaacttactcttgattacaagtagaaacctcagctagccagggactcaacacaagacaaacagctttacctcttagctagatttgaacactaagcaaactgtttcagctgtaaacagaactcttatcccctaagatatgttctctgttttggtctgacatccacctttgagggatttgttctgtcacaaagacaaccttttatttctttgcgaatgtctgaagatgctgtcttggtatctaactacttgatgagatgcttatagttataactgagtgtcccttacagcaatcgcccctgttgacatgaacaaagatggtttggcaaaggaacctcttttcattccttcccgtttctgactttattgagaaagtgattggcctctgttattgcctgtacactgacaactaataatggatcactcacttttataatcgcaaagagatgttgacagaaaatagagatgcctgaccattgtaagcattataagaattggtaagcaaatttagttataaccgtggaggtaggtagttgaagaaaggaaggaaggcagaatcagagccttccagaactggtaaatgcttgagaaaagtccatctgatttcacacatacacaggttgtggatagctgtggccattccagttgtacaccaacccatgactcaatgattgatctcataacttaggcataggtttttatcattttggaatctcttgtctttgctttttctctctcccatgctctcttcagttgtgtcagttgtgtatttaaagaatacagaccccccccccccaaaaaaaaaggaccctgctctttcctcgtgtttatttattaaataactttgttccgccatcatgactttttcttatgcttattttgttgaagagtaagctttttagacatgactggagatcttgtatttcttgtcatctccttccctttcattaaggggcaatcactaccatgaaagcttggtgctcttactgcatagcttgacgccatcaaagtgattattgtcctgaattactctacagatcgatggagtatataaataatggcacacatgtattttactgctctgtaatttattatttttgttgctgatttctgaactgccttacatttttcctgatataaaatttaggcatttttaaattggtttgtcattcctgttttctgttggataactgtccagaaatcatgaactgagcatagtttaaatgatagtcttttgttaaagttagacaaaagagtcttcctaaagaattctttaattttaatattttcactaagtgtcacttaggaacataacagtacagtcatgaactcaggaagaggaaacaactgactcagtacggaatatgtaaatccttccatgatgtcctttggtagaaggcatgtacatggaatttggttttaattattagtatattgtgtttctactgaatggtaacattggcataaaacagttgatctgtgccaagatctcgcctagaggaaaatgaacatagcatatttgttaatgggaaaagatatggatattgtgcaaagaaataaaacactgttatgaaggtggctgttggaaccaagcaaatatagtgatgtatgcactggcacctaaaattgatcatttttgctgggaaattcctctcatacatccctatctctaggaaagccaagctctggtgttctttcttgtgtctgtctctagaacgtgggatgcttgtagaagcttgcctgtcttcgtcatcactgtctcctggaacacaggtctaaaatgattaaggaaggaaattcacctgagagttagttgcctatttctcaattctattctgtcagtctgcaaacagtgatggtactgtaaattcatatttgttgtttacggtggctggctgaatacatgatcagcctcatactgtacttcctgggcttggaactaattgattacatccagtaagctatggcctgctgactggtttatttcctatcttctctgtttaatgttacccagatggtctgagctctgctactggctctaggctggccccagttgtttgcagtgagtggggctcccggatcatttagtcacagcaaacgtctcgatctgataagccccatttaactctcaggatatatcattttatgacaaaatatccccatattgtttatcggtgccccaatcatttggcataaattaatgaaaaatttgtagggctcgagttttgacttcctaaagaactttttttttttttaaagtgattcttttcatgtggagcttgactacatgtataacaggatttagaatctcatctatactttctgccattttcttgctgttcctgttctgtaggacttctgtaattgtttcttcctttccggaagactttgacagcatagaggcaataccttctatctgttccttttcttcattcttttataccgttaccttttagatggcaaaataaaaagcaggctttatgcctataatagttaataactgtagtcttcattccattagtagtcagtttgtgtttgagtgcactgaccatgcccagtttagtgagatttctttctgagactttacccttagatgacctcatgatctttaccatgcatttgtatggtatagaaatcctaagccctcacaggtacatagatagtaggtgtaactccaccccaaccctagttctgaatctttctattcttgagttcttgcttctccctgtggtgattcacattgttcatagagggatgtgtggcttgatttgtcagctgatgctagagagtggacctgtggtttacaataaccctgttatcacttccactcagtacctgtctccagattcctaacacaatgcagcacctctgttttctttccaggatggagaatatattttattattttggtttggtttctgagcataggttttgagagtacatgttataagacctcatctcttttgctttacctggagtatccaagaatggatgttctccactaaattactattaggtttctgtatcaggtagccagcctacactataagtccactaatgttagagagaatcaatacatgtgtgtgtaagtcaacttgtttcatggctttttggtggtaatattttatactactgcaacacctttatttgcatattccaacttcaaaaatatttgggttattacaagcttgctgcgtaagaagtttctctaataagttgttttggtaaagaagactttggcagtgtttctgagctcttaatttttctggaagttttgtgcttatgaggaatcagacatgtaaagattttattcattaaaagcttgaagtaaacattatgattgtcatgttgctaatgttgtatgaaagaaaataattggcatggatcattttccaatcattcagctcaattttgggggcgggggagatattacaacaaacaaaatattttaacatcaaaagagattctttgctttttatattcacttaaacaaatagaaatttttatattttctctcctcttgttttttattactttcctattttacgaatttgatgactatattcaaatgcttatgtccacattgtccaggcatgttgatagactatgttgtagacagggtgcatatttgtggtttgtttactttggaatgaatcaggcagttttagcagttagtgctggcatcaactgacgttagtcaattgcaagggaaggctttctaaaacagtacatgtgtgtaatttgtcactaggaccttgtagtgtttttttgggtctattttctgtggtcaatacagataagccttctatgatgatcataacttttgcatattattacagccatagattcttagaaacttccaaatgagtcctaagtataactatttttgctatgaagttcattgcaatactgatttatgttacagctattagtagtaacagtggtagtagtgtcagaaaatgctttttattatgacaaaatatgtgtaagatgacattttggcacttgaattatttcagttttttccttctttttctttcattgaaaatagattttttttcacacgatgtattctgattatggtttcccttcccctgctcctccatgactcttctgctcccctcctacctgaatctacaccctttccatttctttttaggaaacaaacaaaccagaacaggacaaaataacaaacagacaaaagccaaagaaaaagcacaagaaatacacacctctgtatacccagcaatccccttaaaacaaaaaacctggaaaccataacatatacacaaagcacttgtaaagattttttctatttttttttatttttttaaagatttatttattttattatatgtaagaacagtgtagctatctttagacactacagaagaaggtgtcagatctcattacggatggttgtatgctgggatttgaactcaggacctttggaagagtagttagtgctcttaaccgctgagtgatctctccagccccaaggttgtttttttttttttaattagatattttctttatttacatttcaaatgttatcccctttcctggtttcccctccaaaaccccctattctatccccctctccctgctcaccaacctacacactcctgtttcccagttcggcaattctcttacactggggcatcgagccttcacaagaccaatggcttctcttcccgttgatgtccgacaagacaattctctgctacatgtgtgtctggagccatgggttcctccatgtgtactctttggttggtggtttagtccctgggagctctgggagtactggttggttcatattgttgttcttcctatggggttgcaaaccccttcagctccttgggtcctttttctagctcctccattggggaccctgtgctcagtccaatggttggctgcaagcatccacctttatatttgtcagacactaacagagcctctcaggagacagctatatcagactcctgtcagcaagcacttgttggcatccacaatagtatctgggtttggtaactatatatgggatggatccccaggtagggtagtcttcaatggcctttccttcagtctctgcaccacactttatctttgtatttgcttccgtaagtattttgtttctctttctaagaaggaccaaagcatgcacactttggtctttctttttcatcttcatatggtctgtgaattgtatcttggatattccgagcttttgggttaatatccacttatcagtgagtgtataccatgtgtgttcttttgtgactgggttatctcactcaggatgatattttctagttctgtacatttgcctaagaatttcattaattcattgtttttaatagctgagtagtattccattttgtaaatgtaccacattttctgtatccattcccctgttgaagaacatctgggttctttccagtttctagctattataaataaggatgctacgaacatagtggagaatgtatccttgttatatattggagaatcttttgggtatatgcccaggagtagtataacagggtcctcaggtaatactaggtccaattttctgaggaactgccagactgatttccagagtggttgtaccagcttgcaatcccatcaacaaatagtgctggttcaactgaaggtcagcatgtagaagaatgcaaattaatccattcttatctccttgtacaaagctcaagtccaagtggatcaagaacctccacataaaactcagatacactgagtctagtaaaagagaaagtgaagatgagcctcgaacacatgggcacaggggaaaagttcctgaacagaacaccagtggctaatgctctaagatcaatagtagacaaatgggccctcataaaattgcaaagcttttgtaaggcaaaggacactgtcaataggacaaaaaggcaaccaacagattgggaaaagatctttaccagtcctatatatgatagagggctaatatccaatatataaaaagaactcaagaagttagactctaaagaatcaaataaccatatttaaaaatggggtacagagctaagcagaaaattttcaactgaggaatatggaaaggccaagaagcacctaaagaaatgttcaacattcttagtcatcagggaaatgcaaatcaaaacaaccctgagattccacctcacaccagtcagaatggctaacatcaaaaattcaggtgacagcagatgctagagagatgtggagaagggggaacactcctccattgttggaagtatcttgtggctttgtagcagcccaggattgacagatgtttcattcttactgtgattggtgttggcattctcctacggaaactgaacatttatcccttttctttgttagaaatatatttagcttttccaaggcactctaaaacgatttcgtgcaactatgatctagccctttttaattgtgagactgtagtaaaataattacacgttgaatttatttcaccctgttaatgaagtcctggggaaatgcaggcatgctgagatcctcggctttccccctctgtgattatcactccaggctttcataaaataaccatgtaagtagtacatgaagcttatgtattgctatcattttgatttatgttctgaaggccaaagtgtattaaattgaggctagtaaaaagatattaactgggtctactctacatgtagttgtttagaactatatttgctattagaaattttattgaatacacctcattatagagtcttagaaggtattaaaatttcctcagaaaacagtatgcatggttttcagatcactatgataaagcttcattaagaagccatggaaattttgcatgtggtgagaatatgccatgtgtctttttctccttatgcacagatgctgggtagtgcctgtgactggagagccacaattaagggactcctcagtacccagagaagcatgtgtgccctcctagagagtcacttaagaaactctttgctgagaggggttaggcgtaaatttatgtgtgttactggtgatgacatgaagctgtgctcaccaaacagtctgaaacctgtaagttctgtattcagaagctcaactcaagcactttcagttacagagtctgtcctgattttgttttccagggccagccaggggaccaggctgctctctttactgcacaagcacggccctcccctcagctccctcagtatccagggctgcaacaagcacaggtacccacactgctttgaagcaaaggattccttgatgtttaatgctatttctttggagtaggagatcaaggaaactgcttctcaactagatagagaacttagttatttctgctcccatgatttcagaacagtagttgttgagtcagtcccaggattgatcaggaaactcttagattagaaatggaaattaattcaggcttctcctctgccgctgataatgtgttgaagcacttgatctaaggtggtggcgagcacctgtaacatccacccaagaggcagaggcaggagcattaaggccatctaaggttagatagttgagactgcatctcaaaatcaatcaatcaatcaatcaatcaatcaatcaatttattaaattgtttagtaatctcagttatttatgatacagtgtttaatgatataatttgttatagaaattttcatattcaaggataacttccatgagggatcatggtagaagaacaggacaataggcctttgagtcaggttgcagtacaggtgttgttgactctgtagctgtgtgacatgcatggtattctgaggtctagcttccttttctgtaagatcaagaggaaagatgtgggattcaaggcaacctatggaattagcgtactgtcacatacacagtaaatgctcaacaaagggtgtgcttatctttaaaaaatgtagatctttgtcaggcactagtgttgcatagaattaatgccagcacttgggaggcagaggcaggtggatctctatgagttcaagaccagcctggtctacagaacgagttccaggatatccaaggctacatagagataccctgtttgaaataaaataaaataaatagccctttattccccctttgtccaaactgtttagtagttttattatttctgcatccttacacccttacttctttcttttatataaaaagacccgatactttgataagatttgtgttggggctggctattcattccatgtatatggccgaaaggagtgccctgtttgtcttacgtaagtcccgagtctgggttcctgtaggccacttctgccatttagtgtgtatcactcttgtctccagagtcagagttcttacactgctttaatatgtggtgttttggggatccagagaacaggcagcattttgttcagagaattgttatcttgtgatccagaaaactccatgtttgtcttttacataaggcatcaaggtttagagaaataggttcttgtacgaatgggaaagtataccccgtcagttgatgttcactgggcacggcccctcccttgcttgtcccactttggagatgattctgatattgtttcgattttgttgaatctaggcatggagtgtgtggatacttcgctgattatttctatgcagaatgctgcccttcctagcccatgaaatagacagctcaacttagaaagcaaatgaatatccaattattttgaactagagacttctgtggattcattatccagccagtctattctctaagtgtctggttagacttctcgcctgcaagagtagccatcctcatatgttgagtcatcccagccttgtgagagcagtgagtttcaggttggacctcctgggcttatttttgccccgtgtttcttagtgatgggaatatgggtgctaactggagcactgacattttcctttgtgccttcctgcagaccatgccccagggctacacaatgtatggaacacagatgcctttgcaacaggcagctcagcagcagcctggtggcgtggtcctttcccccagctacaactccagggcctatccggctgcacattccagcccagcgctgatggaaagactccggcagcttcagcagcagccaagtggctacgtgcagcagcaggcctccccgtacctgcagcccgtagctggctctcagaggtgatacctgttgaagtaattgcgatagtaaaaccctctcggccttgggattgttaagctcgctccttccaagcgtttgataccgtaatggtttttgagctcctctacttgagtcctgacatctcattttttttttaaccagcgtgcagtagaggttccaaattctttcattgaagaatgctgtggttttgactcacttcttccatgtgtgctatgtaaagtttttcagatgttacccatgtgttttcttttctgcttttttcctccccaaaaggattttttttttttattaaaagtatctgagaaaactatcgatcatggttagcagcgccttactaggatttgttgatcaagccagtttctgttgtagagctaattgtacatggtgctttgcaaagttttgttatgacttagtttttatttttcccacctcagagatgactcatggccgactcttctggttcttgttttaatcacaccccttcctcctagggtgtgtcagtactgcttattgtcgtagtcgctatccatacatggctaaatttaaatgaattaaatctgatttaacatttatttctgcagacacattagtcaccttttaagtgcactttagccagctctggccagcatggctagatttgaggttcatgtgacatatgcagtgacgtgaagacctggcaggatgctcagctatcttgtgaaattctgtagctttgaccaaggagccttgcagttttgtttatttctaaaccctgataactaactagtcctagtggctagaggccatttcattggatggcacagataggaatcattattgcttatcaaaatatacaatctcattagataatatagtccagaagaattaggtttgtaatcatatagactacattgtacagtggatagcagcttagctcccatgcgttaccatcaatgaccagctacatgtctgctgaggataataactctctgaaagttagggaggtcggtgggatttgtgggaaataatttgtaaaacatgcattttgctcaccatgttttataagtagtagcagagcagagctcagtaacttgagcttaagtgctaaaaaaaaaaaatctgggttcaaatcccacctgtgtcattttttttttctggatgaccttagttatttctctatgtccactgcttcatttttaaagttagagaataaaactgctaactcacagtgatactcgagaagtaatgaaatacgactgttcagccattctactcccagtcttccagaagtaaatattaaattattttcacttactgctaacagcgaatttgatttttttttttaaagtaatttctatatgattgctacttggctcaaagtagtatgtttaccatctttttttctcgttgggtcacatttgttatctgaccctctggccttttcccgttttaattgtacacatgattattgaacacggattgtttcttggtggatgtgtgtaaaatgctggaggcgctgactgactttcgtggtacgcctggttcctgaacacaagttgcattattctttgccagactgaaccaccaggctctacagcagagccctctggtgggcgggggaattgacgctgtgctgactcccgcacatcccaacctcccctcggtgcccctgcctcaggacccaatgaggcccagacagcagcaagttcgacagcagcagagactcctccaggtatggggtagggaggtgagggcgatgccatcccttccggtagtgcagatgcatttcgagtgaagcgttaacttccaaagcgccctatgtatttcacactaagcggcttggcgagtacactgtagttctccatctagagagagttttcttttctctgtatctgccaggccatgggcaggagactgcattgcgcaggcagaaccattccctttcccagagcttcaagggggcacatggatgccttagtttaaatgtgagcctcagcttacctggttgctaattgcctaagagcctacaatttgcatataaaatttaatattcataaggaacaaattagacaggaacaaaagcagcttgcagtcatctctttgattctcatagcattgtgatttctatcacacttcttctctacttaaactgtggagatggagaagcagagattacacaatttggagggctctgtgttggaatccagaaagctaccgtgtgttcatttgatataaatacttaagacttctaggtagacagaagtctcgagggtttctcgctttagcacattcgtgtttctgatttctttattttccagtattattgtggatgggggatataagtcattggtaaagcaccttcccagaatgcacatggccctgggctaatccccagcactggaatgaaggaagaagcagaggcaggcaggcaggcaggcaggcaatcgtgttaaatctgtgctatttttcttcactattcacaagtgatggatacttcttggtaagattgttaagagaactctcattgccagccaaaaatgaggtgcaactttatctacccgcacagaaacacagggaaatgtggaatctagtggagcagggtaggcacaagagaactatttatgctctatgaggtgacaggcaagaaagcagggatgcagaaaggaccttaagggagatgtgtctcaacttttacactggatggagagaaggaaaaaaaaaatagttcccctaagaatctaaaccgtaaatatgcccaagtgatgacgtctggatctagtgtgatctacaaaattatagttgagaggatccaaggaagcaagaagtgaagaccagccctctatagaacagagcttcagtttataaggtgaccattagtacatcctcattttggataaagtattttaaaagtcatgatacattattgataatacatggtaactgatttgggtgactatagcctattgaagtcctactcgttgtatagaggccattgccaaggtggtaaagaaaaaaatctactcttgaacttgtcatcaataaaatggaaaagatgatagagccgctttctaactgtgcattggataaaccaacaattcagttcaagacagttcaagcaaagcactaatttgatgttatttctaataatttttagtaacataactactaaaacagagactgttatgttctttaacctctgtcctacaagtttgcaaatattttttcagggcaactatttgaatggctctgttttaagatttgttatttctaaattaccaaggaaccatgctttgttgcttacttatcactttctgccttcccagggcattttcaaggttgcaaatagatcattttctccactaggtagcctgttcctttcccccctgttagcctgagccctgatactgtttcttatcagcaacaaagaaaggaagtgtgattcgtccgtttgtctaaagtacatttattcttctttttatgattggcttttggcataaaggaaaatgtcagcagttgagaagttgagttcatctctcttgagagattgtgcagagaaccaagtgaatggtagtttcatattgcagtgcttctggttcagccaacactgttcgtgttgacacacatctgcaccactgctgggactccagatcgcacgtattgcagatctcaaagtacatagttattgttttcactttaaaaggtcaagtaatttggggaatagtatatagacaaagttgggaaaatacatatgatgaaaatctagtcgggtcaccagtaactaaaggccactgagagaatatatatacatacatttatttacctacacagaaatataaaatatatatatatgtatatatatgcatgcatgcatatgtatatgcattctgtttcttctgtgacttagaagtgttttccaagagctatggatttgagccaatttggtgtagacaggcttctgtgttttatgctggtaatttattgcacactttctatggggtagtttatatcctttatataataaaggtaaaaatggagacctcaggggtcttccaaataacatagagaagatagttactgattggtgcttgtgttagttggaactgtgagataggtccttgtggatggactggcagagcatgtgaaagaagccaaaacaataagtgtacaagatgttcctgggcagtaagcactggctgccaaaggaagagacttttagttcggggtagtctgaaaaggcttcctggaagaacaaggtttggcaaggtaaagatgtaggatgcagggttacagtcatgcctcgcatagtaacatttctgtcagtggcaggctgaggtcacagcaatcccttcagagtttagtgcagcttaaacatgcttttaccttgtgacaccatgggcttcattatcacgatagcatcatcatagcacaacgtaaatgtgtttggatgttgcggctgtaaagagacgtatcccactgcctgttatataagagcatcacaatgatgaagtgctcagtaccaggaaagaaccatcccccgatatgcctgctcattctctacgctctatattgttattatagagtatactcttgcctgttgagatatctttcagggctggagatgcacctcagcagtagagcacttgcctgggatgcttgaggccctagcttgaattatttgcactagagggaaagaataaaacagtatgttgtgttttatcagcagcaggctcatgcatcttgtgttttctgtgtctctaagttgcatcatttaccatgtccttaattcactcttaatttcattttgttcaccatggccctagaagtaaaaagctgcccaatgtatatcctgcagcctaggtgtgtggttgactacaccacatatatttttgtacgtacacgaatgttcagacaatgcaagaatcacctaatgacatatttttggggagtatatcccaatcgttttgcttaaatggaagagataaaatgtatattagtgagggctattcagaaatgtctcagccccaccattttaaggggctaccataatctttttctttctttctagatgcagcagccccagcaggccccccagccccagcagccctcacagacccagagtcaggcccttggtctccaagcaatgcagccccagcagcctttggtaaggcctggtgtttggaaccaggatgtgggtttctcctttagatttagcaggtacactctccatagctatgacattttaagagggaaattgtctgaatatacttgaccacctttcctagaattctgtcagggttttgttcttatagtagttggcatattttttttcatttaaatgaataattaatatacactaacaaatttcaatatacaaataaaattttgcttcactcaaatcttaccatttttcgttctgaagaagaagaaaaaatagtaaagcgctcaatggatgagaaccttaccagcaagatattaagacattttctataaagagtaaagaatgatttcatggctatcttgccaaaagcaatctacagattcaatgcaatccccattaaaattccaactcaattcttcaacgaattagaaggagcaatttgcaaattcatctggaataacaaaaaaccgaggatagcaaaaactcttctcaaggataaaagaacctctggtggaatcaccatgcctgacctaaagctttactacagagcaattgtgataaaaactgcatggtactggtatagagacagacaagtggaccaatggaatagaattgaagacccagaaatgaacccacacacctatggtcacttgatcttcgacaagggagccaaaaccatccagtggaagaaagacagcattttcaacaattggtgctggcacaactggttgttatcatgtagaagaatgcgaatcgatccatacttatctccttgtactaaggtcaaatctaagtggatcaaggaacttcacataaaaccagagacactgaaacttatagaggagaaagtggggaaaagccttgaagatatgggcacaggggaaaaattcctgaacagaacagcaatggcttgtgctgtaagatcgagaattgacaaatgggacctaatgaaactccaaagtttctgcaaggcaaaagacactgtctataagacaaaaagaccaccaacagactgggaaaggatctttacctatcctaaatcagataggggactaatatccaacatatataaagaactcaagaaggtggacctcagaaaatcaaataacccccttaaaaaatggggctcagaactgaacaaagaattctcacctgaggaataccgaatggcagagaagcacctgaaaaaatgttcaacatccttaatcatcagggaaatgcaaatcaaaacaaccctgagattccacctcacaccagtgagaatggctaagatcaaaaattcaggtgacagcagatgctggcgaggatgtggagaaagaggaacactcctccattgttggtgggattgcaggcttgtacaaccactctggaaatcagtctggcggttcctcagaaaattggacatagtactaccggaggatccagcaatacctctcctgggcatatatccagaagaagccccaactggtaagaaggacacatgctccactatgttcatagcagccttatttataatagccagaaactggaaagaacccagatgcccctcaacagaggaatggatacagaaaatgtggtacatctacacaatggagtactactcagctattaaaaagaatgaatttatgaaattcctagccaaatggatggacctggagagcatcatcctgagtgaggtaacacaatcacaaaggaactcacaccttatgtactcactgataagtggatactagcccaaaacctaggatacccacgatataagatacaatttcctaaacacatgaaactcaagaaaaatgaagactgaagtgtggacactatgcccctccttagaagtgggaacaaaacacccatggaaggagttacagaaacaaagtttggagctgagatgaaaggatggaccatgtagagactgccatatccagggatccaccccataatcagcatccaaacgctgacaccattgcatatactagcaagattttatcgaaaggacccagatgtagctgtctcttgtgagactatgccggggcctagcaaacacagaagtggatgctcacagtcagctaatggatggatcacagggctcccaatggaggagctagagaaagtacccaaggagctaaagggatctgcaaccctataggtggaacaacattatgaactaaccagtacccctgagctcttgactctagctgcatatgtatcaaaagatggcctagtcggccannnnnnnnnnnnnnnnnnnnnnnnnnnnnnnnnnnnnnnnnnnnnnnnnnnnnnnnnnnnnnnnnnnnnnnnnnnnnnnnnnnnnnnnnnnnnnnnnnnnnnnnnnnnnnnnnnnnnnnnnnnnnnnnnnnnnnnnnnnnnnnnnnnnnnnnnnnnnnnnnnnnnnnnnnnnnnnnnnnnnnnnnnnnnnnnnnnnnnnnnnnnnnnnnnnnnnnnnnnnnnnnnnnnnnnnnnnnnnnnnnnnnnnnnnnnnnnnnnnnnnnnnnnnnnnnnnnnnnnnnnnnnnnnnnnnnnnnnnnnnnnnnnnnnnnnnnnnnnnnnnnnnnnnnnnnnnnnnnnnnnnnnnnnnnnnnnnnnnnnnnnnnnnnnnnnnnnnnnnnnnnnnnnnnnnnnnnnnnnnnnnnnnnnnnnnnnnnnnnnnnnnnnnnnnnnnnnnnnnnnnnnnnnnnnnnnnnnnnnnnnnnnnnnnnnnnnnnnnnnnnnnnnnnnnnnnnnnnnnnnnnnnnnnnnnnnnnnnnnnnnnnnnnnnnnnnnnnnnnnnnnnnnnnnnnnnnnnnnnnnnnnnnnnnnnnnnnnnnnnnnnnnnnnnnnnnnnnnnnnnnnnnnnnnnnnnnnnnnnnnnnnnnnnnnnnnnnnnnnnnnnnnnnnnnnnnnnnnnnnnnnnnnnnnnnnnnnnnnnnnnnnnnnnnnnnnnnnnnnnnnnnnnnnnnnnnnnnnnnnnngggacttttggtatagcattggaaatgtaaatgagctaaatacctaataaaaaatggaaaaaaaaaaaaaaaaaaagaagatcttatatattttataacattctcagagagtctgaaagtactttgtaaaatgacatgttagtaattaaaccaagtctctctatccagttagcattttctgcaagaatttccacattgttcataatctacagtccacttccttaacttctccaattgaatttgggagcatgtgtataacatggatgatttgaaaacctcagcgatgttgttgtccatggctcgttctactcaagctctacccgaggctggtaggttgctgtactcactgccacgggaaagcaacagtgccacaggttgtcagcccaggatcggaaagaaaaggagcatggagccatggcaggacactggggagagtcagtggagttccatggttaaaggctggacccgagcaggtctctcctgtggtaccagcccagtagagggtccccaggtagggaggccccagcgacttgtaacatatactgctctggccagctgagtcccatctttttccccattcttttgtaccaagtgtttagcttttccagttttgattccttttgtttaaaaatatttatggcaatctatgtaaccttgtttttttttccttaagtagaggcagaatgaaacttgcttctttgtcaggagcataaagttggctagggcaactttttaaaagaaatactataaaagagacttttgactggactactgcttacctgcatagtgttccaccaggaaagaagttgtaccctccctccctccctctctctcttacatagtttcaaacccacagaaaagcttcaagagtggtacaaagaatttccctgactccttcacctgtgctcactaagtcccatgcagccacatttgttttgtgattcccctcctccctgatccccacataccaggcaactgtcgccatgtgccagtttaatgttaaatatttccgtctgtttttctctagagcaagatggctgtgggttcagttagtgaagtgcttgctagcatgagtaaccccgggtgggatgtcagcatggcaaacacacaaacccacagacaaaaccactggttaggatggctgaagtcaggacattgaacactgacatcatactctgaacactgacatcatactctgatgtatacatggctttggatttttttttttttttttgactatggcagtggtagttcagtatcctttctgccatgtatttccctgcctccgggttattactatttagcttccatgtctcctttacccacacagaatttgcaacaattccaaagtgccctgacttcatcttagtaatgatgagttatttattcagtttttaaatgctactgagctgactcactgcttacgcatgacacccagcagtttctgggttgaagagctgcttcatgtacctacatctcaagagcattcataattcctggggaagcggtgtctgatggctttccatcttaaagtcactaacttctccttttaaagtagtaatgtaaggacatggtttcatccaatctgtcctgttgctcgttagactctcacgcaccagtgttgtcattggctgtctctccctgcttctactgtagaaaaagaaaaatgcttactctcaaatgctgtcgtcttgtttttgattgcctggtattcgactcacaggaagaacttccccactgttgtttgtctgtctttaagtcatgtttcaaatacaaaggaaggtgtgctttttctttaagatttcatttcagttttaattatttatgtatttgtatgtctgagtgttggtttgtgcttgtgagtgtagtgtattctgagatcaatgaaggccctggtactggtattatatgtagttgtgagctgcctgaagtaacttgggtgctaggagcggaactcaggtcatgtggaagagtagtgtttgctcttaatgttgagtcacctctccagctcaggaaagcatatcttaaaagtgaaatctaccacttgaccctttgacttaacaatctggcattactaagagtagcttgaagtcttctcccaactttactgagtatctgttgttacatagcaatagttagatgaaatttgctgaattagaaaaatcatcaaaatcggggctgaaaagatggcttattgttaactgctgcactggctgctcttccagaggctcctgaggtcagttcccagcacccacatggtggctcacaaccatctgtaatgggatccaatgccctcttctggcatgtaggtttatatccagatggagtactaaaaataaatacataaatacagatacataaaaataaataaatctcttttaaaaatcagggaggggaaaccaggaaaggggataacacttgaaatgtaaagaaagaaaatatctaatacaaattaaaaaattaaaaatcatcaaaatctttccccagtctgaaggtctgtccatgggagggacacttgccttgcccatacgggtatctctgggtttgatcccccaaactgtaacacaatgaaaaaatttctttccattgagtaggttattaagtcacacaaacagaacttagcactactctctgtgttttctttctatacacagccagatattctaaaggttttgacggagagccaaaatctatgtaaataggtcttgttgagtgtttggaacatttgatactgactggaaaaatcctaactcctcctttatgtaaaacaaagatttttatgctatagtactattgttaccaacagtgttgagtgtgatcctaacggaagtaactatcacatagttacacctttctagtgatttatgatgtacgtgagtccttgttaaatgtaagaaacccaataattcaggaatggtaacttgtatgtagtaattgctaatgaggaaatgattgtacagtaatacccttttagcaaaaatacaaactttaaatgtagttattattgaatatatgataattacagcatattttaagctttttaaacttttgattcaggtatgtaatgaaatgaaatattgcatgctctgttcctcacaaataataaaatccctatatttcaattacctatagtcattcatatttaatctgtactttttcttataaggaaaaatttaaagattcactcacacagatatgtaacagatgcgtaaatcctaaaacatgtcattgcctgtaacatcagcactgggcaggtaggaacagcaggatggctggagttcgtgggcccatcagactagccattggggagctctagggtcactgagagacggcccattcaaaactacaaggtgagaagtgacggaggatgacactcaatgtgaacctctgccttctgccgtaagcttgatttagaggttgggtcagggattttcctccacctgctactaaatcatatttcatttcatatgtaatagtgatatatgatgtcttggttacttttctcttgccgtgaagagtcaccatgaattgggcaacttataaaacaacgcattttacaggtgactctgagggtgagtccatgaccatcatggtggagagcatggcagtaggcaggcaggcagtggtagtagcatggtggctgagtggttacatctacagaccagaggcagagactgggcttttgaaatctcagagtgcaaagtcccccagcccccagtgacacacctctgaattcatcataagcactacaactaggaaccatgcattccaatgtatgagcctgtggagacagttcacattcaaaacacggtatttgagaataatgaagatacaatgttagctttgttcatagtgtatgctgcataattccttatgaatggcagtaccaaatgccttagatgtgtatgttatttggggtaggataaacaaagaaactgaattctgttactaaactgtatttataggtctggggaatttttttcattgtagtttaaaacagtgacagagttatacagtcatttacccacaagcattagagcatagctcatcaaagggagcttgacatttttatactcagattatagttctgtgaatacttaactgagttattgtgtagaaagaacatgcaatttaatactgatttctaaggcaattctgttgattattagactgtgtttcacccaccggcttaccatactaccaacccaaggactgaggaagtaattcagaacttggaagataactttttttttctcattatgctcatgagaaagtaatttgatggaaataaatgcctttattatttattaataagaattttaataatctgtaatgagccttttattttattttattctgcttggcagaaggattccaattctcactgagaaacacagcattgtttcaatagagaacaatctttcataaagaatccaagcaggagttatagcttagggaccagctggtatgtgtctgtgagcctcagaatgggctgggaaatttacaacatttacatctaagtggtcagttttagaattagaaattataggagtggtcaatactatcaagatatttcatcattataattctttttaggtttactttagtacatctgtatgctatctatctataaatctatattctctattatctatctatctatctatctatctatctatctatctatctatctatctatctatctatctgtctgtctgtctgtctgtcttagtgagggtttctattcctgcacaaacatcatgaccaagaagcaagttggggaggaaagggtttattccacttactcttccatactgctgtttatcaccaaggaagtcaggactggaactcaaacaggtcaggaagcagaagctgatgcagagcccatggaggggcgttctttactggcttgcttcccctggcttgctcagcctgctctcttatagaaccaagactaccagcccagagatggtcccacccacaagaggccttttccccttgatcactaattgagaaaatgccttacagttggatctcatggaggcatttcctcaactgaagctcctttctctgtgataactccagctgtgtcaagttgacacacaaaaccagccagtacactatgcatctatctattggttgtgacctaagcctttaacaactgagccatctcttcactttccacttagagacagggtgggacatgactgtcctggagttcactatctagctcaggtgggcacttaacttacagagatgtgcctgcctctgcattcccagtactgggattaaaggtgtgtgccactacacctgggtatacacatacttttaaattattttttgatgtagttttatttttcagttgctgaaccattcctctactgttaaaattttggactgttaccagttttaaagatagtactgttaaagatattttggtatgtattctatacctcttcttcattgtctcataatagaaaacagatacaaaaatattttcaactaattatgtatgtcaatatcaagggcacaatacctcagcaactttaaggaaaaaaattacatttcttttttgattacgttcactgagattcactattttttaaacaccttggcttctattcataatagacatccttagcagatccaactcgtgtttcaggcctgctctccccttcagttcccatctttggagaagagggtggtgagctggttgctgaggagaggtgagcttggacttctctggggttgtggttgatgttgcatgaagggaggagtaagttaccacaccaccttcctgacctgccactccctgcctgccgacgggtacagtggattttagatcagtacttatttgttatattcagtagaggccagcagcctgtgagacattagggagagtgccatggaagtaccgagtatgcttttcgctactggaggactgagaatcactggaaatggctgaatggccatgttgtacatgaaaagtagcatatggtgggtagacctttttagttgaagagcttcagaagttgtactgatttgttagttaggtatgtgaacttacgtggcttaaaagtgggtttgtgtttttttcctctctgttctggaaactggaagtgaaagatgggaattcagcaatggtggttccttctgcttgctgatgggagagcccatgccatgcctctgttccagtccctcactgtgcactggctgcctttagtatctgagctttgtgccaccctctcgtggcgttctcactgtttgcactaatgtgcccacgtttccctttttatgagagtaccattcatgttgtgttagattccatggaaataatcatggctacctctagaaaagctctacctccaagtaatgtcacaatcctggggtttaagactatagcatttctattttgagtgatagagttgaagccctaacagagatccaaagatcgagaaacgtggagcccatgttggaaagcttcagcgtaagccaccatgaaaggcagtgctacatctgttgccttttgactgtgactttgtcagtctcctttagttggtagcatcagttgggacatggtaggcagtgacaatgaatacccatagccaagttaatcactgtataaaggtgtttttaaggtcaaaactgccttaggacagaaactgtcacctcttcaaggtatcctatggaagcttttctgtaaagtgagtgtgaaagattaagagaagcccaataccatcagttaagtgtggtgacaactttgtgtgcattcctgtgtcatttgtggtctgggaagaaagggcaactagtggtagcctctgtcctttctggggaaatttgtgtggtgtctcaagcttggtcataagtgtagttcttgacttataatcctttaaaggttcgtgtgtttaaatgactattaactctgtttgatagatgtagaatgaagctccttccaacattcaagaaaataatatccatactgtgtaactaagtctattcttttcatcttatgctgtcttaattgggtgacttaaaatgcactcgttcttgggggaagattatgttgtattccattttgcctttcaaaaaacatacatgatagcagcattagttaagaactgctgtgacttttgaccagcagccacagacaaaagttttatactggtctttctcggggaattcgtgctctgttatgagaaattgagatcgatagttctaagagtgcccttaggattcagtagccaaatgacacagctcccacctgtatcatgagaatattggtagtaaagggtcataggtctttattattcatagtctaaattcaaatatctctgaaaattcaagattaaacatccaaagctgaggagaagggacatccagctctctctctctatgcattctctggaagggggctgtgtggatgaatgtttgcagaaatgcagtgtgtgtggagaagggttcagccctacatgacatgatgagagctaacatactaacttccatgttgacacacactaaacatgaaagcacctgtaccaaaagctttgttaacatcattgttcgtcagaatcaagcgccagagtgtatacctataatgcccacaatagttcatggcacatagcaagacttgttaaataggattctaagcattgaaatggttgaattaaaaagaaaacacgtgccttcctgaattttccacacagaggaatgattgttgttctgttttcccagacctgtatgtggagagggttggtgctggcaatggcttatcatctttgtgtgccattacacatggaagagtcatcttggcaatgctgtctaaagttagagttttctgctaaatctgaatttcaggcaagcagttagcaaaagtgttacgtcaaattttctgttgggttacttggactaaattcagtatttgtcacgtgaaatattaaatattagtaaaataaaaaattccttgttacttgtctgaaattcacatttagctatgcattctgtatttgaatttcctatatgacttaacagtcctgggcagcttttagtcatactgaggacctccaaggaagagggaatcatgttgcattcacattgagaatggtcttattaaaaactcgttagggatgtgaagcagattaaggacaagcaatgcagatgtgttacaggcacagcacagacctctcagcctagtgtggtgagaagaggggaggtggagagagcccagttacctgagggaagagctcaggcacggctgccttggatgcactaggctggcagagagccactgtggaagaagctggcaaaaataaagaaaactccttaccatgctcctccctggcctaggtcagctctcactttctatctctggagatgctctctagggtgctgtgacagcctggttattgtgttccatacaggcagatggcacagactgaggttaacaggaaacaaccagttctttgtgtatgactaagagatgctcgtatcagagcatcccagttgtttctaagtcgcaagaagacagctgaggagtagagaaaggaaagaaagagaggcagtccgacacctgcagttaggaagtgtcctagtatcattggtgattctaatcaaaaacagctttgcttctagcagacactgatcagtcagtctccccatgctcctcaaacatcagccgcagttccttgtgtggtacttccaggtcccctcagacagggctaggagaaaactccttaaaatgtgagtgttcttgtgtatggcccagctcaccctgccatggctgtcaggtggaggtcagatgttccacaaacccatgctctatctcacaggctctgctctgccctgcccatggggtctgttggcattggacagatctccacagcagagagctttcatcttgtcagagaggtccttggatgagtgggctacctctgtagtgagcacttcttcatggaaactctaaagataaatgccaagcaagtacctgcgggaagcactgtttggccagctgtaccgtaggcaaaaccagacgtatccaaactgagcatgtgaacgtgccttagccagccccgaggtacagcctgtgccttgtggagcacgagtggctgactcatccttccccttgttgcaattacagttccccaggcaaggcttgcagcagacccagcaacagcaacagacagccgccctggtgcgacagctccaaaagcagctttctagtaagtacctatctcacactgagccaggggagtctgggagtcagcgacaagcccggcatagtaggctcttcagaaatcacactgtgtcctctgaaacatttttaaagactttttcattgaaatagagctccatcactttccttcctcgctttcttctgtctcctctctcagctactctccattaaacccctcctagacctccactgtccactcctcctcttttatttgactacttttgttacatacatacatgcatacatacatacacatatacatacatacatatacagatgcatacattcatttattcatacatgcatgcatacacacacatatatccatgcatgcacacatatgtgcacacatacatatatgcataatatatgcatacatgcatgcatacatacatacatttttttttcatgtttggcttggtctgaggtatttcactttgtcttagtttgattagttttggacttacctttttcttcccctggaaaagccacatttttccccttaaattcagtattttcctgttgttttatgtgactttcccaaagcacacccaacccccttttgttggttttattttatggtgctgaggatagaacccaaggcttcctgtgttccagacatgtgttctactgcttaacctcaactccatgcccgggtcttgtttttatagagctagaaatgtttaaggagaaactcatcccatgaccttgacttagatcacccctataccagtatctcaggatagaatcgttttagagatggagtgagtcccttgtgtggtgaaacatagtggcctggagtcacaagacctgatttctttgccaaggtggccattattggctaggtcacgttttcccacctatgaaagtataggagacacgttttcccgtggctttcagattcagtgtttctgagttacagggtggagtctgctgcatgttgaaacagtgatgtggcatccatttgtggctgaggggtagctttttgcatgactgctttgcatgtgggaatcttgacagagagaattgccccccacctccctccacactccttggtgtctctgccagtcatatcttaatttttctttattttattttgtttttgtttttggtctttaacatataatgtacacttgtctgtgtctttatgtaacacatcaccatgttccatgaatacatacatgagatttttctttaatttccaaacctgaaatatgtgtgtatgttttcatgtagcctcagttaattttggttacgtgaagtaagatcaatttttttcctagctgttttttttaagtaggtatactctattaaataatctgtgattaaaacaatgaaatacgacgatatttttgagttaaaattcttgcagagaatataacctgaaggcttggccttatagtgtttataaatcagcactgaggagtcctgtattgcagacttatctgaagagcatgtcagcttgctctgctgtccccagagtgtcaagagctggaatacagctcttggacactgtgagtcaatctatctaatcccgaggcattgtgtgggcagctgtgggtctctcctgtagacttggcccctctacagaatacatttggtcacattacatggttattggccccagggtctagcctgttgctctgtcctcccatacctggggctgttactgagaggcccgccagagagaaggtgttatctgcagcaccagttcacatctgtaactgttgtgtttgctttccccttaggtaaccagccacagcaaggagtgactccctgtgcacacccttcacacttttgaatcggaaagagaagacatgaagtttatgtttgcactgaaaaacagaaaatcaaatttagtagtcctcataagacgtctcctttggtctttggttatttatgttttcctatattttatgctacatttcatgcagaagtatttaaataagtaaaggagtcatggtttggttttatcagatttaaaataggttttaaaatgtggatcatacaggcctactccagatagtgtggtagcagaccttttgaaactggtgcttttttatctcatatttacataaagaatgaattatggtaggtttaaatatttatgtattcattaacgattttttttaaacctgtggtggaccaaactactgatttgaaagctgtggcaggtctcgcgggagtggacacattagctcttcactcgaccgtggcggtggggtgaacattttttttttttttgcatcactttaatttgaaatgttgatcattttcataagcactttataaacttcgttcgcatttatgaaggacttggcttcgcttttgttgtggtccaaaggtgctgaaacggattgttgcttagtacttccgcttcttcagggcttctgcaagagccacctggaggactgtgggagtctctcagaagcagctgcactcaaatttgttcccagtggcaaaatctttatccagattcttcatgaaggtacaacctataaccacgggaggccagaagaaccacggtggaatcggtccattttacttactgccagttttggtttaaaaaaaaaaataactgtccagtttaggttcttcagaacctcatgccaacttgagaaaaataaaataaaatctcacagctggccttagattccacagtgctcagacttgacatggtttccagagggttctggtagtcatcaaaggtatacttgctgttaattttgtatggtaagtatttacaattttgaatttaattattaatgttggtgtcagtcttggttgtgtattgcttctactgtatttataaaccggtgcaaaaagcacaagtaaagtaaattatacatcaaaatttattataaagaaatagtaactattttaactttgttcaagtatgtggtaatttgctcctattagagtgaaaaaatacagtaaattattatcagtttgtgtaacttaagagtattccgtataatatttttttagaattagatgcatacaattttgaatgtgaaaattgcagggcattttaagacatgtagggatctttccctgtcctttgttgggttcactttctttttgccatatgatttcacatgtaatgtagtcaagcatactgtgaatagattgtctatgaagagcagaccctgtagaactacttttttaaaatgtagctagtacgacttcagatgatttctttcgcagattgttattataaataatttatatcttcctaggtgagttacccattgcagagtttgactcattcaaatgacctcagatccatgtttgcttactttgccatggcgacatcgtgtgaactgctgtgtacactgtgaaatatacccctccagcctgcttgttttgtgtttactctgggctggaaaagactttgccaaacattaaagaccattcttcccaccgagttcacattctctctgctctcagacagtgcagtacatttcagtggtcccatatgtccgctttgctttcctctccagagtcattcttaaaattcacgaagctatcctcctccctccccccgccccgggtaatagaccatatgattgcattcgcaaaaccaccgaagtgtgaatgttgtgcctagtgagtgggccatatcctgtcctctctggtcttaattcaatgattgttgatggttaaaactccagcttcaatctgaaccttgtccttttcgtagctcaatattgtgaacagcagaacgagtgttagaactgcatagcatttgtttgcactttaaactttgcagaagttaatttattaatcattttgcacatgaaggctatggttattcctttgtcgttgtttgttttatttgttaagatgaggaaggtaaatcatgctaaagccctctagttctgagatgccgtgggggatgaggaaaaacctagagctctttgccctgcgcgttacaaggaaagcaactggaattttaaatttagttattatatttactgccacttaattctgcattctgagaggtttttttttttctttcatagcaaatgcatgtggttggcattaaaattgtcctaaggaaaaagctctattgcagaaccttgtcatttgctgggtgggttgcagataggaaattaaagaccagaccttgaaatctaatggaattgggtatacttaccatttctggctataagaaccccttaacatctgtgttatattgtaagctgaatctttagagggtggcatttcttgttttatgtaccctttttcatctaaaagtagagggagactactctacggtgggtatcatttgacctctggcagccatagagtaccaatgttaactggagtcagctcatgtctgaggtaggggccaaaagaaagtaggcattacggaaagtaggcatcaagttccagatgaatggcatgtgctaacaaagctcttggtcttagtgatctgggctaactgaatgacttttgcttttttaatttacaaggctcctttataaatagatgaaataaatttataagtagatgaaatttggacagaagccagagaaattattctagaaaaatcccagtctttagaataaaagaggtgaatcatatgatactcccacatatatttgggttaaattaaacatgtaatgttagtacggtgaaatatgaaaataaaacccaccatttaaatacagtgaaacttgattatatagaagcagttgtctagactcgtggaggaattctgccttagaaagtctgtcttcagaatggctctgaaccatgggtgcctgagcaaggctttaaagttataaggaagtgtcactgtacctgtagagcatttcaggatgacaggtgtggacaaatgtgaaacccgctttgcacttcccaatgtgtgagcattaggctgccctgtacatgtagaaaagctagcctgcatttgttttgtcttgtttggtttcatttttaacgcaggtattaaaacaatgggaactttcagtgtgaacaaatggtaaactattaatcataatcagaacagttctgcgcttgttttctgtaggttttatcaaaatgtttgtaaaccagtgacaaaatatttgtgcattgagattaacacgggctgcaaacctaatctttcacgttgtctccattcattctgtgtgcgatgtttgtaacattggtggaaaacagacacaaggcagctggcaactgttagcggaagaaaggtctttttactgaaaattcaggtgcattcgccatttgttaatttgtagcggatcattttctcttaatgttttttattatttgttggcaaaatcaaagtgccttaagttaagagtttgctttgaaatccatggaaactcggaatcagttcacagtgcatttatttacaagtctcactgcatgtccattgtaaatttaatactgtaaatgtattcggattcatttacatgcctatggctgcctttgattaaacttcttccaaaaaataaagtctgcagatgttggcttttgttccattcagtttctcccttcctgtcagaggacctggatgtaagttgttgcataatcggcaccaagcacgttctgtgctctgcatttatagacgccagaatctgaggctcgtagattctgaatgaccagcgtaccttgtaggggaagcatctcacttctgtggggccttctttctgtcgccgttgagagcagggagtatcccggcgtctcccaggtgatttgtggcttggggactcccaaggccacacagtggagctgcattgcctctcctgtcctcctgagcatgctcctgggaaggtagtttataattcggggagggtaggccacaatcgtcacgggaacactaataactgcctggccaacgctgttttgagccttacagatataatttcctctgtcatgagctgttgtttctttgatgaccaacgtgccattttcatgcaatatgtattttccaccgacttgaggtctgtcgattacaaggccacctggcgtagtccatttgacatttggcttagggattccatcagacacacaatgcagggatagcgattccccaccggcgctctttatcatccccggttcgtatgtcagaatgactggcttctgtccaatttctaacaggatgagtttctcgatgtagccaaccttatttcttgctgtacagcgatactttcctgacttgttccgagttgctttgtaaacaatgagagaaccattgcttgccatcagatatggggaattttgtggcccattagcaaattgtgtgccatcaggtaagatccagataatttcaggtgttgggttcccatccacagagcagttcattgctacaggcttgccaacctgggcaactactttttcattgaatgggtttctgaatgttggtcttctcagcatttccagtacttttaactgcaccaccaacacactctctcctccttcgctccgaaccacacaggtgaaatccgcagaatcagaaagccttatgttccgaatttccaaggttccattttgatgcacggtgattctgcctccgtagtatggagccgtgaggaaaatattgtctggcataatccatgtgatctggggtggtgggaccccatctgctctgcagtccaagtgttttttggagtgctgaatggctgtggctttaataacagttttgtttgcatacaaaccattgattaatggaggcctagagacaatatccagtttgtatgtcttagtgtcatccccactaggattttgagctacacacacatacttcccagagtcaagcggtttcactttattgatggacaaagttccattggcatgaaatatgaacctgtcattggagaatgaaatgacattgttggaaggcagcaaccaaaatacatttggcttgggttccccagtgacctcacagtccaggacagctgtgtctccagccttgatccttacattgctcctgtagttttgccttatccgtgggatggctgttagaactgttaggtgaactttcatttcatctttccctaaggtgttctgagcagagcaaatataatctccttcctctgccatcccaactttgttgaaatacaaggttccgttgtggaagagggtgtacctcttggtcctgtagccactgtcatcagcttgtgctacattgttcaccactgttccatcaggcaaactccaggatacctcaggcacaggggagccagaagccttgcagtcaacttggaaatctttcccatggagtacttgcttcttaaaatgctgcttgtgttcaattttggcaggtgtcagtcttaggcggacatgcatcaggaccaggtcatctcccattttgtttcttgccacacataagtagtcaccaccatccttttctgtcaccgatccaataaccaaggagccatttgggtagacatggatccggctgcccattctaaggagagaagagacaagcgtgagaatgcagcggggagaattggggcttaggagatgactcagttgggaagctgcctagtgcacaattttcagacctgaatttggatctccagcgcccacaaagagttaggcaaggtggtcacatccatacccccagaatggacacagctggcccccggagcttgctcgacagctggtgtacctgaaagtacctacagctctaggctcagtgagaggccctcctgagagtaaggtggaagcaattgtgtaagaccccaatgcttatttacttctggccaccacacatgcacacaccaaaatgaacgagcataccttgcacaaacacataaaaagactaaatattgtcaccaatgtagacacatttacagaatattatactatgtagaagcagccttatttataggatgttacttccctccagccttactaagagctgactggcacagttgtacatacatgtaagtaatttagtaggaaattgtgacacatagataaaatgaaaatgattatcacgatcaagctcatcaccttgtcacctttccttcttcctcttcttctctccctctccctttcccttttcctccccctctcctcctctttccttccctctctctctctaacatggcattatctttatggattattttttaaagctgttaaaatgaagaccaaagtcacttattgttatctaagccatttgcttaaaaaagctttgtaacaaagcataatttgctggagacagtattattttcgaaatggccttcaatcagctcttttttatacaacttttagaaacagctcactggtgagaaggatgctggaagtagccagttcttaagacattttatatatcaaatggatccacaaaaatagcatatcctgctaatgaaaaacaactcgagggtatgtgctgagttaatgcctgatgctaatttttaaatgtgttaacgaagcaactttttagttatttaactagaagcaatctgtccattgcctgctgcagaggacagcattctaggatgaattagaagttgaatcacctgctgcgtaattgacacagttgaccaccaggtggcagaccctagctttagtgttaagaacatgctcaaacacacctgtgtttttccccctttcttttgacaacatgaggtaaacagaatacttggagctcaggcttcaaggcaagaatgtttgagaagtgatgtggggtaggtctaggcattggtgttctggcgtgatggttatgtgtagcagacactaaggactaaagccctaaatgttggttcttgacagtccctcccttaaactgtgttacactgtatgggaccagacttacgcacattgcttggtttctcgtaacagtgattcagatagagctggtcagggacattgacctcgtgcttaggaaaattctcaagttgcttacatgggccattaagtttgagacccagactcaaattctagtgtgcatcacaattacctgaggggcttctaagaacacagactctttatcaaaacaatccctgcttctgattcaagttcttggttaatattaatgatactggtaaagaggcaaccttaaaaaaaaaaaacctaaggtgacaagcctcaaatctgatccaccatcgttacaatatgtaacatcctccattaaccaacacttgaagaatagtgacataagaaaaggcttatctgcttcggagagggctgggaactaccaagtagctttgaagtaaaaaaacttcaaaaagagacaaaacatcagtttgacaagactgtctttccttcagctgtcaacttggcaaggcctaaaattaactgagagtctcaattggtgggtttttgcatactacactggcctgtgaatatgtctgtgcaggattgtgttgattgacaaagggataccagccctccctagttgacaccatccctaaacattttggtctgacctgtgtaagaaatctagcagaacatgattcagtaagcaagcaagcagcatgtcttcatgctccttcttcaagttcctgccttgagtctgccttgagttccaactgtgagttctctcaatgttggactataacctgtaagctgaaataagccctctcttcccctgaattgtctttggtcatagtgtttgtcacagcaccaagaataagctaggacaaaggtgatataacaggtataaatatatgcacttgatatggtaccacctggatatataatatataatattattagatataatattagatctaaggaattaagttcaatgcaatgatagtagatatgtcaatatttaatttttaatatacatatatacatagaaaaacatatacatatatgtatatacatacacatatatacggaaaaactaagaaaaacctgagttggaccacactatagagaaaactgatctaatacacttttaaggatacttcattcaaccagtgtaacacacagtcatatcatcagcacatggaattttctctaggtgagttcacatgtcaagtgtcaaatttttaaaaatttaaattttattgtatttcttttcagacaagtgaaattcattaagaatgaaaagccatatagtaaagtggaaattaaataacatgctactaagtggacagaaggcaattgaaacttaaaagagaattgtaagaacattaaaattgcaacaaactatcaaaactgtatgatagaaaaatcagtattgagaaaaatttataacatgatatgcaatcttaataaaaagttttcaaacacaggatcctcaaggacttagggaaacaaacaaaaaaattaaaggaaaagtaacataataaaaaactaaaaactaaacaaaaccccaaaaaaacaaaagggcaatgaaatctgtgagtttaaaaaaggagaataaataccatctctaaacctttacatagattaataaagaaaaaagttgacagtcacataaatcaaaatggaaacattattgtactactaacaatagttaataatattgtaacttggcaggatctagaatcacttaagacgcaagtctctagacaaacctaagaggatcatctagattgtgtagattaggttaggatctgagcatgactggagaggttttattgattaattgaattgaaaagacacatcctaaatgtggacagtgtcttctagcagcagcgacataagaagatccaaagcaagaatattgacgccctttgacccacttcccctgtttcttgttagtaaactgacctactctgttgcagctgcctttgctgacatcagaagtcagcctccttggtctgtcaaattgaactgaagaccaggcctttagtgccagactggagttactgacactcagcttcagggacagtgtagctcctggctctcggcatttccagtgtgaacacagcaattggactccccagaccttgttgtggaagccaattgcattcctgattagtacatatttatgctactggttctgtttctctagagaaccctgatgctacagaaacacaaaagattattttaaaactactatgaaaaagtatatggcaaaatcacatgaattttagaagtactgtgcaagtttctggaagcatgtggccttctaaaactgatcaagaaatagaaactgtaattaaacattatagcagtaatgaaatgtcttctgtctaataaaaatcttaatatcttacagctgtactgatggtttatatgaatatgtaaagagttacttccatttcttaaagtatgaataggcaacccatttccatcattctaagccaaaacacagcaataaaaaaaaaattaaacccatacccatgatgaacacaaatgcaaattttctcaataaaatagaggtaaacttagttcagcatttcaatatgttcatagaacatgatcaattaaggttaaccccaggaatgctggggtggcttaacatttcaaatcaataaacttaatacaacacaatcaaagacaaagccatgtgactatctttatagaagcaaaagaagcaattggttgagtcttagtgtccttttataatgagtcaacaaatctatgctgaaggaacgtatctcaaaatattaaaccctatatatgaaaaagtctaccataaatatcacactggactaaagggctaaaagtgtgtcttcttaggttggaacaaaactctgttttcactgttcttactcaaagccaaaagaattattaacctgttgtttcaatgaaaaccccatcaaaattccaatcacttccttccaagaggtaaataaagcaatcctataattcctatagagccacaaagagtcagagtagctgcagcaattctgacagtgtgtgtgtgtgtgtgtgtgtgtgtgtgtgtgtgtgtgtgtgtgtgtgtgtgtgtgtgcatgcgcacgtgcatgagagaaagagctagagcgagctggtgttgtgaaaataagtacaaagttgataagtgaactattgaagataccgaatgtcaagatgggaaacacatacagaggagaaaatatatgtaagcatgtggattctaaagttcaccctctttagctaagcactttaaaactttacatcttagtgaactacagtctaacatttaaggtaattttgattcctgaaaaacctgaaaattaatattgacatttaaattaaaaattacaaatttattcattatattgtgtaccaacttactgtaatactagggaaaaaaaccttcaatttccaagtgtccatgtaaattcatatgtactatgtttaatttctattgcatgtatattttaataaacaagtgtaaacggaaaagcactcagcttcatctctttctagcatcctataaaagcattgcacaatgtcatgaagaacacaatttatagtccacaagctataatttttgcttttcagaaacaggatttactatatagtgaagagtgtacagtgaatatcaatttttagaaagagcacagtaaaaaaggtttgtataggtaacaccaagtaagcaaaggagataattttaacagaaaggcttacctgtgccactggtcaatgacaaccttggatggtaacttccagattattgtaggtttcggatccccagtagctgagcagttcagtagtaatttctcacccaaattcacctctgtccatttctgcgaggcagtttctatcctgggaactgtctcttgctcttctactcttagaatcactacccttctctctgagcccgaggagctggtagcaatgcattcataagtgcccctgactgaagaaacgatgtttcttatatacagggtcccatttggatacaagaaaaacctggaatgagtcaactgcagtggttttagttcagtcccatcatagaggacccaatgaacactgggctggggagttccctttgcagtgcagggcagtttcaaactttcacctaaaacgccaacgatggcttgtctcttttgctctataataacagggggagctgtgatgacttgtatcttaaccaacagtgaatcctggccagatgggttgttggctacacacttgtaaaaaccacggtcataaagactcaaattatggatgatcaacgttccatcgggtgtcacccagaccttccggcttccctcgggtgtttccgagaccactgtttggtttgcgagtatccaggaaattgtaggtcttggcataccttctactctacacttaagtttcacagtacttccggaatgagctgtgatctccttgacatgactctccagaatcctagcagggtaggagaccacagacagagtgacatgaaggtggtctacacctagtggattagaggcagcgcacaggtactgtccacggtcctgaatgctgaccctctggatggacaaggtgccattgggaagcacatgaaaccgggttttctgtatccctcgggatatttcacgtcctgataaaatgaaaaaaaaattatagaattcatgatcattgttgaactgacaaaaaatacaatgaaattgaaaagcatagtcttcaggtggttaaagctgtttttcaattttttattcacataaacttaaatttaaaatccagatagttcaacatgatatttatgtaaaattatatatatacctatatatatatgatcaattttcaaagtattttggccttaacatttttattcatttattttaatgtttttatttttgaataggtcatttcaccctttctcctccctccaatttcttcatttatctcctcttatttttattcatttattttaatgttttcatttttgaataggtcatttcaccctttctcctccctccaatttcttcatttatctcctcttgctctttcaaatttatggcctctttttctttaattattgatatatatatataaacatgatctgctcagcctatacaatgtataaacctatatgtatatggttttagtgcagacaatttaatatcagagaaataattggtcctaaatgttgttttaaaatgttttaagacagaatctaattttatagcctaggctggcattgaattcatccccgttgctggcagtataggcatgtactatcctatctagccttaataattactctcttaaacttcccttatcaatacgttttaatgatttgtgtgtatatgtatgggcacatgcatgccattgccagtgggtagtgataagaaaacaatctgagggagttggttctctctgccatgtctgttccagagactaagctgacgtcatcaagcttggcaatatgtgccctttacacacagagccatctagctgcctcccaaaccattcttaacacattataaaaaagaaacgcttggcaatatgtgccctttacacacagagccatctagctgcctcccaaaccattcttaacacattataaaaaagaaacgcttctagtaggggtagagagatggctcagcaggtgagaacactagttgttgttgcagagaacctagattcagttcccagtgcacacatgctggctcacaattatctgtagttcaaattccaggaagtatgataacctgttctgacctgtgtttacttcaggcacacgtgtgcatatacacatatgctggccaaacatgcatacacataacataaatataaagtttaaaaccttctggtaggggctagagaagtagttccagctccaggaaatctggtacctcttagtgcgtacacacacacacacacacacacacacacacacacacacacacacacacttaaaaagtcaaatctagcttttatattttgaagaaatttaaaactagtgttggttctttgattactatcctgaaagatctgatcgtgtccctgttttgtaactaaggtatagctaatggttccaagtacctgatgagactctggtccagtggatggtgggctttgggtctccaacagcctcgcaaggaagaaggacatctgaattagttggaacagtaaagcttgcagcctttcctccaattattcttggtttcttcaatatagtcttaggcagagagtcatagggcaggtgtttggaagttgggttttgagcaggtttcttatcaaagacactcttttctgcatgcctctgtgcattccaatgcaaggcatgagtgctggcctctggaaagctgaggtggggtgacaggcttatttctggccttttgcccttttcaatggtttctgagtatgacctgagctgaaatttgttttctggccagggagaaggcttccattgagaatcctgtggtttatccactcttggtgctggcataggagtggaggtcaacagactagagaggggaaagtcagtggatccagttaagatctcaggattggggctagcctctgctgagggttgctgcagatctatatcgtgccttgaagattcatatatggtgaccatcctatttgacatcatcttgaaaactgctgggacctcactgtctgtaaccacaaccttagtgaagggaggaggggaaggagtaggcatt

SEQ ID NO: 791 - DNA, 4090 bp, Mus musculus
gatgaatcttcaagtcatgaatgtaaccagcgcacaatccttctctatggagtcggaaaagagcgtgatgaagccaggcatcagctgaagaagattaccaaagatatcctcaaaatcctgaacaagaagggcaccacagaatcaggggttggggacgaaggacagaaagccaggaagaccaagcaggaagtttttccaaccccggaaaatgtgttcacgaaactccaactcctctcatacttcgatcagcatcaagtaacatctcagatctctaacaatgtgctggaacaaatcacaagctttgcgtctggaacatcctatcacctcccgttggctcaccatattcagctcatctttgatctcatggagccagcgctgaacatcaatgggctgattgactttgccatacagctgctgaatgaactgagtgtggtggaagcagagctcctcttgaagtcttctagcctggcaggaagttacactacaggactatgtgtctgcattgtggccgtgctcaggcggtaccatagttgcctgatcctaaatcctgatcagacagcccaggtgtttgaagggttgtgtggtgtggtgaagcacgttgtcaacccctcagaatgttcttccccagagagatgtatcttggcctacctctatgacctctacgtatcctgcagccacctcagaagtaaatttggagacctttttagtgcctgttcaaaagtaaagcagaccatatacaataatgtgatgcctgcaaattccaacttacgctgggatccagactttatgatggattttattgagaacccctcggcaagaagcatcaattattcaatgctgggcaagatcctcaatgacaatgctgccaaccggtacagctttgtgtgcaacaccctcatgaatgtgtgcatgggacaccaggatgccggccggataaatgacatagccaatttctcctctgagctaactgcctgctgtacagttctgagttcggagtggctgggggttctgaaggctctttgttgttcttcaaatcatgtgtggggatttaatgatgtcctctgcacggtggatgtgagtgacctttcattccatgattcattagctactttcattgctatcctgatagcacgacagtgtttctccctggaagatgtcgtgcaacacgtcgcacttccctctctcctagcagcagcttgtggagacgcggatgcagagcccggggcaaggatgacgtgccgcctcctgcttcacctcttcagagccccccaggcctgctttttccctcagggaacaggcgatgccaaaattggcagtaacaatgtcaacacgatgaagaatgaagacttcggcatgaggggtttacgacgtgatgggaatgctgaagatgcctgggccacctcgcagaactcaaaatcgtatgggaaaagtatttccatagaaactgccaatctcagagaatatgctagatacgtactgaggactatctgccagcagaatcttgagcagtggacgttgagacagtcctggctggagctccagctcatgatcaaacagtgcttgaaggaccctagctctggttctgtggccgaaatgaataatttgctggacaatatcgcaaaggcaacgatagaagtgttccagcaatctgcagacctaaataataatgcctccaattctggcatgagcctcttcaacccaaacactattggaagtgttgatccaagtagcacaagacagaatggaataaagacattcttaagttcctctgaacgcaggggtgtgtggctggtggcccccctcatcgccaggctgccaacatctgtgcagggaagagtgttgaaagccgctggggaagagctggagaaggggcagcacctgggttcctcttcaaagaaggaaagagataggcagaagcagaaaagtatgtctcttttgagccagcagcctttcctctcattggtccttacctgccttaaggggcaagatgagcaacgggaaggccttctaacatctctgcagaatcaagtcaatcagattttaagtaactggagggaagaaagataccaagatgatacgaaagcccgccagatgatgcatgaggccctacagctccgcctgaatctggtaggaggaatgtttgacacggtacagcggagcacgcaggggaccaccgactgggccctcctactcctccagataattacttcgggaactgttgacatgcacactaacaatgaattattcacaacggttcttgacatgctgggtgttttaatcaatggaaccctggcttctgacctatcaagtgcttcccccgggggatcagaagagaacaaacgtgcatacatgaacttagtaaagaaactgaaaaaagaactaggagacaagaggtcagaaagcattgacaaagttcgacagttgctgcctttgccaaagcagacctgcgatgtcatcacgtgtgaacccatgggttctttgatcgatacaaagggaaacaaaattgctggatttgactctattgataaaaaacaggcaagaggtctccaggtctctacgaagcagaaagtgtccccatgggacctgtttgagggtcagaagaacccagccccgctgtcctgggcctggttcggcactgtccgtgtggaccggaaggtgatcaagtatgaggagcagcagcacttccttctgtaccacacgcacaccatgcccaagccccgaagctactacctcgagccgctgcccctacctcctgaggaggaagaggaagaactcacgtctccagtttctcaggaaccagaaaggaaatcagctgagctgtcagatcaaggaaaagctacagctgatgaagagaagaagacaaagggaaggaagcgtaagacaaaatcgagctcacgcatcgataccatgccccagggctacacaatgtatggaacacagatgcctttgcaacaggcagctcagcagcagcctggtggcgtggtcctttcccccagctacaactccagggcctatccggctgcacattccagcccagcgctgatggaaagactccggcagcttcagcagcagccaagtggctacgtgcagcagcaggcctccccgtacctgcagcccgtagctggctctcagagactgaaccaccaggctctacagcagagccctctggtgggcgggggaattgacgctgtgctgactcccgcacatcccaacctcccctcggtgcccctgcctcaggacccaatgaggcccagacagcagcaagttcgacagcagcagagactcctccagatgcagcagccccagcaggccccccagccccagcagccctcacagacccagagtcaggcccttggtctccaagcaatgcagccccagcagcctttggtaaggcctggtgtttggaaccaggatgtgggtttctcctttagatttagcagttccccaggcaaggcttgcagcagacccagcaacagcaacagacagccgccctggtgcgacagctccaaaagcagctttctaggcttctgcaagagccacctggaggactgtgggagtctctcagaagcagctgcactcaaatttgttcccagtggcaaaatctttatccagattcttcatgaaggtacaacctataaccacgggaggccagaagaaccacggtggaatcggtccattttacttactgccagttttggtttaaaaaaaaaaataactgtccagtttaggttcttcagaacctcatgccaacttgagaaaaataaaataaaatctcacagctggccttagattccacagtgctcagacttgacatggtttccagagggttctggtagtcatcaaaggtatacttgctgttaattttgtatggtaagtatttacaattttgaatttaattattaatgttggtgtcagtcttggttgtgtattgcttctactgtatttataaaccggtgcaaaaagcacaagtaaagtaaattatacatcaaaatttattataaagaaatagtaactattttaactttgttcaagtatgtggtaatttgctcctattagagtgaaaaaatacagtaaattattatcagtttgt

SEQ ID NO: 792 - protein, 1250 aa, Mus musculus
DESSSHECNQRTILLYGVGKERDEARHQLKKITKDILKILNKKGTTESGVGDEGQKARKTKQEVFPTPENVFTKLQLLSYFDQHQVTSQISNNVLEQITSFASGTSYHLPLAHHIQLIFDLMEPALNINGLIDFAIQLLNELSVVEAELLLKSSSLAGSYTTGLCVCIVAVLRRYHSCLILNPDQTAQVFEGLCGVVKHVVNPSECSSPERCILAYLYDLYVSCSHLRSKFGDLFSACSKVKQTIYNNVMPANSNLRWDPDFMMDFIENPSARSINYSMLGKILNDNAANRYSFVCNTLMNVCMGHQDAGRINDIANFSSELTACCTVLSSEWLGVLKALCCSSNHVWGFNDVLCTVDVSDLSFHDSLATFIAILIARQCFSLEDVVQHVPSLLAAACGDADAEPGARMTCRLLLHLFRAPQACFFPQGTGDAKIGSNNVNTMKNEDFGMRGLRRDGNAEDAWATSQNSKSYGKSISIETANLREYARYVLRTICQQNLEQWTLRQSWLELQLMIKQCLKDPSSGSVAEMNNLLDNIAKATIEVFQQSADLNNNNSGMSLFNPNTIGSVDPSSTRQNGIKTFLSSSRGVWLVAPLIARLPTSVQGRVLKAAGEELEKGQHLGSSSKKERDRQKQKSMSLLSQQPFLSLVLTCLKGQDEQREGLLTSLQNQVNQILSNWREERYQDDTKARQMMHEALQLRLNLVGGMFDTVQRSTQGTTDWALLLLQIITSGTVDMHTNNELFTTVLDMLGVLINGTLASDLSSDGGSEENKRAYMNLVKKLKKELGDKRSESIDKVRQLLPLPKQTCDVITCEPMGSLIDTKGNKIAGFDSIDKKQRLQVSTKQKVSPWDLFEGQKNPAPLSWAWFGTVRVDRKVIKYEEQQHFLLYHTHTMPKPRSYYLEPLPLPPEEEEEELTSPVSQEPERKSAELSDQGKATADEEKKTKGRKRKTKSSSRIDTMPQGYTMYGTQMPLQQAAQQQPGGVVLSPSYNSRAYPAAHSSPALMERLRQLQQQPSGYVQQQDYLQPVAGSQRLNHQALQQSPLVGGGIDAVLTPAHPNLPSVPLPQDPMRPRQQQVRQQQRLLQMQQPQQAPQPQQPSQTQSQALGLQAMQPQQPLVRPGVWNQDVGFSFRFSSSPGKACSRPSNSNRQPPWCDSSKSSFLGFCKSHLEDCGSLSEAAALKFVPSGKIFIQILHEGTTYNHGRPEEPRWNRSILLTASFGLKKKITVQFRFFRTSCQLEKNKIKSHSWP

SEQ ID NO: 793 - DNA, 5077 bp, Mus musculus
gatgaatcttcaagtcatgaatgtaaccagcgcacaatccttctctatggagtcggaaaagagcgtgatgaagccaggcatcagctgaagaagattaccaaagatatcctcaaaatcctgaacaagaagggcaccacagaatcaggggttggggacgaaggacagaaagccaggaagaccaagcaggaagtttttccaaccccggaaaatgtgttcacgaaactccaactcctctcatacttcgatcagcatcaagtaacatctcagatctctaacaatgtgctggaacaaatcacaagctttgcgtctggaacatcctatcacctcccgttggctcaccatattcagctcatctttgatctcatggagccagcgctgaacatcaatgggctgattgactttgccatacagctgctgaatgaactgagtgtggtggaagcagagctcctcttgaagtcttctagcctggcaggaagttacactacaggactatgtgtctgcattgtggccgtgctcaggcggtaccatagttgcctgatcctaaatcctgatcagacagcccaggtgtttgaagggttgtgtggtgtggtgaagcacgttgtcaacccctcagaatgttcttccccagagagatgtatcttggcctacctctatgacctctacgtatcctgcagccacctcagaagtaaatttggagacctttttagtgcctgttcaaaagtaaagcagaccatatacaataatgtgatgcctgcaaattccaacttacgctgggatccagactttatgatggattttattgagaacccctcggcaagaagcatcaattattcaatgctgggcaagatcctcaatgacaatgctgccaaccggtacagctttgtgtgcaacaccctcatgaatgtgtgcatgggacaccaggatgccggccggataaatgacatagccaatttctcctctgagctaactgcctgctgtacagttctgagttcggagtggctgggggttctgaaggctctttgttgttcttcaaatcatgtgtggggatttaatgatgtcctctgcacggtggatgtgagtgacctttcattccatgattcattagctactttcattgctatcctgatagcacgacagtgtttctccctggaagatgtcgtgcaacacgtcgcacttccctctctcctagcagcagcttgtggagacgcggatgcagagcccggggcaaggatgacgtgccgcctcctgcttcacctcttcagagccccccaggcctgctttttccctcagggaacaggcgatgccaaaattggcagtaacaatgtcaacacgatgaagaatgaagacttcggcatgaggggtttacgacgtgatgggaatgctgaagatgcctgggccacctcgcagaactcaaaatcgtatgggaaaagtatttccatagaaactgccaatctcagagaatatgctagatacgtactgaggactatctgccagcagaatcttgagcagtggacgttgagacagtcctggctggagctccagctcatgatcaaacagtgcttgaaggaccctagctctggttctgtggccgaaatgaataatttgctggacaatatcgcaaaggcaacgatagaagtgttccagcaatctgcagacctaaataataatgcctccaattctggcatgagcctcttcaacccaaacactattggaagtgttgatccaagtagcacaagacagaatggaataaagacattcttaagttcctctgaacgcaggggtgtgtggctggtggcccccctcatcgccaggctgccaacatctgtgcagggaagagtgttgaaagccgctggggaagagctggagaaggggcagcacctgggttcctcttcaaagaaggaaagagataggcagaagcagaaaagtatgtctcttttgagccagcagcctttcctctcattggtccttacctgccttaaggggcaagatgagcaacgggaaggccttctaacatctctgcagaatcaagtcaatcagattttaagtaactggagggaagaaagataccaagatgatacgaaagcccgccagatgatgcatgaggccctacagctccgcctgaatctggtaggaggaatgtttgacacggtacagcggagcacgcaggggaccaccgactgggccctcctactcctccagataattacttcgggaactgttgacatgcacactaacaatgaattattcacaacggttcttgacatgctgggtgttttaatcaatggaaccctggcttctgacctatcaagtgcttcccccgggggatcagaagagaacaaacgtgcatacatgaacttagtaaagaaactgaaaaaagaactaggagacaagaggtcagaaagcattgacaaagttcgacagttgctgcctttgccaaagcagacctgcgatgtcatcacgtgtgaacccatgggttctttgatcgatacaaagggaaacaaaattgctggatttgactctattgataaaaaacaggcaagaggtctccaggtctctacgaagcagaaagtgtccccatgggacctgtttgagggtcagaagaacccagccccgctgtcctgggcctggttcggcactgtccgtgtggaccggaaggtgatcaagtatgaggagcagcagcacttccttctgtaccacacgcacaccatgcccaagccccgaagctactacctcgagccgctgcccctacctcctgaggaggaagaggaagaactcacgtctccagtttctcaggaaccagaaaggaaatcagctgagctgtcagatcaaggaaaagctacagctgatgaagagaagaagacaaagggaaggaagcgtaagacaaaatcgagctcacgcatcgataccatgccccagggctacacaatgtatggaacacagatgcctttgcaacaggcagctcagcagcagcctggtggcgtggtcctttcccccagctacaactccagggcctatccggctgcacattccagcccagcgctgatggaaagactccggcagcttcagcagcagccaagtggctacgtgcagcagcaggcctccccgtacctgcagcccgtagctggctctcagagttccccaggcaaggcttgcagcagacccagcaacagcaacagacagccgccctggtgcgacagctccaaaagcagctttctaggcttctgcaagagccacctggaggactgtgggagtctctcagaagcagctgcactcaaatttgttcccagtggcaaaatctttatccagattcttcatgaagctcaatattgtgaacagcagaacgagtgttagaactgcatagcatttgtttgcactttaaactttgcagaagttaatttattaatcattttgcacatgaaggctatggttattcctttgtcgttgtttgttttatttgttaagatgaggaaggtaaatcatgctaaagccctctagttctgagatgccgtgggggatgaggaaaaacctagagctctttgccctgcgcgttacaaggaaagcaactggaattttaaatttagttattatatttactgccacttaattctgcattctgagaggtttttttttttctttcatagcaaatgcatgtggttggcattaaaattgtcctaaggaaaaagctctattgcagaaccttgtcatttgctgggtgggttgcagataggaaattaaagaccagaccttgaaatctaatggaattgggtatacttaccatttctggctataagaaccccttaacatctgtgttatattgtaagctgaatctttagagggtggcatttcttgttttatgtaccctttttcatctaaaagtagagggagactactctacggtgggtatcatttgacctctggcagccatagagtaccaatgttaactggagtcagctcatgtctgaggtaggggccaaaagaaagtaggcattacggaaagtaggcatcaagttccagatgaatggcatgtgctaacaaagctcttggtcttagtgatctgggctaactgaatgacttttgcttttttaatttacaaggctcctttataaatagatgaaataaatttataagtagatgaaatttggacagaagccagagaaattattctagaaaaatcccagtctttagaataaaagaggtgaatcatatgatactcccacatatatttgggttaaattaaacatgtaatgttagtacggtgaaatatgaaaataaaacccaccatttaaatacagtgaaacttgattatatagaagcagttgtctagactcgtggaggaattctgccttagaaagtctgtcttcagaatggctctgaaccatgggtgcctgagcaaggctttaaagttataaggaagtgtcactgtacctgtagagcatttcaggatgacaggtgtggacaaatgtgaaacccgctttgcacttcccaatgtgtgagcattaggctgccctgtacatgtagaaaagctagcctgcatttgttttgtcttgtttggtttcatttttaacgcaggtattaaaacaatgggaactttcagtgtgaacaaatggtaaactattaatcataatcagaacagttctgcgcttgttttctgtaggttttatcaaaatgtttgtaaaccagtgacaaaatatttgtgcattgagattaacacgggctgcaaacctaatctttcacgttgtctccattcattctgtgtgcgatgtttgtaacattggtggaaaacagacacaaggcagctggcaactgttagcggaagaaaggtctttttactgaaaattcaggtgcattcgccatttgttaatttgtagcggatcattttctcttaatgttttttattatttgttggcaaaatcaaagtgccttaagttaagagtttgctttgaaatccatggaaactcggaatcagttcacagtgcatttatttacaagtctcactgcatgtccattgtaaatttaatactgtaaatgtattcggattcatttacatgcctatggctgcctttgattaaacttcttc

SEQ ID NO: 794 - protein, 1104 aa, Mus musculus
DESSSHECNQRTILLYGVGKERDEARHQLKKITKDILKILNKKGTTESGVGDEGQKARKTKQEVFPTPENVFTKLQLLSYFDQHQVTSQISNNVLEQITSFASGTSYHLPLAHHIQLIFDLMEPALNINGLIDFAIQLLNELSVVEAELLLKSSSLAGSYTTGLCVCIVAVLRRYHSCLILNPDQTAQVFEGLCGVVKHVVNPSECSSPERCILAYLYDLYVSCSHLRSKFGDLFSACSKVKQTIYNNVMPANSNLRWDPDFMMDFIENPSARSINYSMLGKILNDNAANRYSFVCNTLMNVCMGHQDAGRINDIANFSSELTACCTVLSSEWLGVLKALCCSSNHVWGFNDVLCTVDVSDLSFHDSLATFIAILIARQCFSLEDVVQHVPSLLAAACGDADAEPGARMTCRLLLHLFRAPQACFFPQGTGDAKIGSNNVNTMKNEDFGMRGLRRDGNAEDAWATSQNSKSYGKSISIETANLREYARYVLRTICQQNLEQWTLRQSWLELQLMIKQCLKDPSSGSVAEMNNLLDNIAKATIEVFQQSADLNNNNSGMSLFNPNTIGSVDPSSTRQNGIKTFLSSSRGVWLVAPLIARLPTSVQGRVLKAAGEELEKGQHLGSSSKKERDRQKQKSMSLLSQQPFLSLVLTCLKGQDEQREGLLTSLQNQVNQILSNWREERYQDDTKARQMMHEALQLRLNLVGGMFDTVQRSTQGTTDWALLLLQIITSGTVDMHTNNELFTTVLDMLGVLINGTLASDLSSDGGSEENKRAYMNLVKKLKKELGDKRSESIDKVRQLLPLPKQTCDVITCEPMGSLIDTKGNKIAGFDSIDKKQRLQVSTKQKVSPWDLFEGQKNPAPLSWAWFGTVRVDRKVIKYEEQQHFLLYHTHTMPKPRSYYLEPLPLPPEEEEEELTSPVSQEPERKSAELSDQGKATADEEKKTKGRKRKTKSSSRIDTMPQGYTMYGTQMPLQQAAQQQPGGVVLSPSYNSRAYPAAHSSPALMERLRQLQQQPSGYVQQQDYLQPVAGSQSSPGKACSRPSNSNRQPPWCDSSKSSFLGFCKSHLEDCGSLSEAAALKFVPSGKIFIQILHEAQYCEQQNEC

SEQ ID NO: 795 - DNA, 109661 bp, Homo sapiens
  misc_feature (1)...(109661): n = A,T,C or G
attatggaaggaaaacgattaagaatcatgttgtcacagtatggcttcaattttcagcatctcctcacctatttagcgctttaaaataatgctaaacaaaacctaatgttttccaatacaagatcactgattttaacctttcctgctactgctgtgtggtcttagttcatccctgaccgttttggaaattcgacttagtgaatatacattttgtgtagtctgtaagatatttaacaagtattcttgacattgagaatttcagctccctttatctgtatttaaatctcattttatacttgaggcaaagtaactaagaccatttatattttatttctatgctttgtataatttttcttaataaagaggctaattaacaattgtctctgacatcactaattagacttctattttaattataatttttattccaaatacatgcttgcattgatagttattaaggtttacaattttaagagaaacttggaaaaaatgtacacacatatcagagtgtaaatacatatatttgtcaagtacttgtagaaataacattacctgataactgttgattctggagggtttgaatgtatccagtaagtagtagttattgcaacctgcagagtggcatctggtattttccttttaatgtcttagtttagttgccaaacctctttgtgatagaggatttcctgagttttcgtcagtaaagtcttgagtgctctagagagaaatagaaggagagaaaaagagggcttcacaatcagagattgtcttcaaacactggactcaaagctatgcagacactgaatttctatctgtcctcttttaggacttctgcttttatttcccaggaaatgtgggatgaggatggctgagaagtcatcttttaaaaagcaatttaaaatcttgcggctttttactgaaacctgctatagagttgatgatttataacttcgagttatggttattttctatgcaaatgataaatccaagttgagatcaagccttcgaagtctgcttcctggagaagattttaagcttgctttcttgggtggttaatttatctgaaatatattgtgtacaacactgggtgatgtattttcttctaacaagtaattatgttaactcaaaatgcgtgctggctagggatgttaagtctctggccctttgtttttcccttggttaataatgtcattattttaaacctgtgtttgattaactcctttgtaggtgaaacagcttccttctattataaattagcagattccaaaattacattagagaagtgattgtatccattgccaggcttattatatactgtgtcgttcatgcttttcttgaatagaatttaaatataaacaatttttttttgtttctttacctaactttgagtttttgggaaaatataacattaaattaaggcatccttgtatcacaattatttacagttgtttaactttgaaaccagaagggcaaaaaatatgttaggggtgagattgaagggcaaagtgttttgctgctttaactttttttttttaattttattattattatacgttaagttttagggtacatgtgcacaatgtgcaggttagttacatatgtatacatgtgccatgctggtgtgctacacccattaactcgtcatttagcattaggtatatctcctaaagctatccctcccccatccccccaccccacaacagtccccagagtgtagtgtttcccttcctgtgtccatgtgttctcattgttcagttcccacctatgagtgagaatatgtggtgtttggttttttgttcttgcgatagtttactgagaatgatgatttctaatttcatccatgtccctacaaaggacatgaactcatcattttttatggctgcatagtattccatggtgtatatgtgccacattttcttaatccagtctatcattgttggacttttgggttggttccaagtctttgctattatgaatagtgccgcaataaacatacgtgtgcatgtgtctttatagcagcatgacttataatcctttgggtatatacccagtaatgggatggctgggttaaatggtatttctagttctagatcactgaggaatcaccacactgacttccacaatggttgaactagtttatagtcccaccaacagtgtaaaagtgttcctatttctccacatcctctccaacacctgtgctgctttaactttatgtaaatattgctttgcagaaacacacctccctggtgtctcaaactgcagtgtccttctgttatcagtgggaatcatttgtgttggtgcctttgctgtgaacacgttttggttttatcttctgcgttttgagtatttgtctatgtctttacatgttaaatatcttcattggttttcacagtgcagagcagcagctctgcatcacttgggaacttgctagaaatgcacatttttgggcaccaatctagctgagtgaatcaaaaactctggggtgccccaccctgcatctgtattttagtgagccttccattgatgcttggtacactcaaatgtgaggaccactgatttaaatggaataagaattttgttgccatttagaacttgaagctattaatatcagtcacttcagacacataataatccccaaatgttggtcatcttaaagggattagtttgatattaaactcttggaaagggttgtattgttatttttaaatatgactattgtaaacaaatcttagccttccttatttgttggagtctcaaaattttaaaaagagcttttatgctgtatgtacttcaaataataattgtcaatatttaatttcttacactgtcatggattaactcactttattaataatctcaactattctctgaagtacgcgtatcatcctcattctctggatgaggggaactgaagagcagagcagtgaagttagatggagaccccattctgacctgtgctgtctagttagccttagaatctgtatttgtgtatttctgtacctgagaatctttccctatcacaccctctcctcaacccctctcccactaagaggccccagtagtgagaagtgaatctcgtgtgggatggttgtacgtctttcaataaaataaggaccatactctcctttacagcaaattgtaaatgctaaaggatgtttatgatgctttttctaagaccatcaaatgaaacaaggcttattcaagaaaatgattatttttaacaaatcaatctgccatattactaattcagaatacttaagtcatactaccttattgagaatttatatttctaaacctctagaagggctaacagtagagatttgagggataaaagaagggcttcagttcttgatctaaattaactttatttttcctctgatttttaactcacaaccacatacctatttacaaaccacctctgataacattttttcattggaggaagactgccagttagaccacttaatgctgaaagtgactaaaatctttaagtgaaaagtatctcagttacagaagtatattttcatatgaatagaagcagagcaagttatagatactttaatctctcattagtaaataacatcaacacatacagtttgtagttatttgtgttagtgttgggaacagagctaactttggttggtttggttattttgtacaattgagatgagttagaaaaatgaacagaatttttacttttaagtggcttaactggtttgtttattttaccaagtctactaaaggtagtctgctcatctgaaaatgtttgcttcaaatgggattactctgaaacctgtagtcttttggaactgggcaggaggatagagatataattatgacatttgatagctcttaggctgttttagttccagtggtctctggttctaaatgtggtcattttgacattaatattttgtttgagggtgtgtattttaaagcagtgcatagtcatgtctgctagcttggctttatccattggaatatagaaatttaggttagataccaacaggttccaaaagtaacgagtcttgggcattgaaatatttcgcaaaaatgaatgccgtcttttgtgacctagttatctgacatcccagtcttaagtgttctgcttgcaagaagaggactagtagatatataaatatcagtcatactgtggactataagctgtgtagaacaaagatttaatatacaaatgtagttaaatccgcctcctattttcttgatttacagaaaatatactctatgtatagttactaatgattaaaaaaaaacctgttaatttcttcattcctgtaacagtttcctcatccatgtgcacacccattcttcctcccaggctcgaagcttattcctgatggaacatttatatgaacttgttttattctaaacaaaatagcatggtatattgaaagatacagctgaaagaaatagtgttttaaggcatcttttaagagttatttaataagctaaaaattttaactaaatgcatttattgtttctaaagactggtttttactgcttttcttagagacgtgataggttgctatgtgcagtttacttccggatatatactggatttgcatttgaagtagagcatgcaaaaattaggaagtactgggaagtatgaagtgccatattttgtcttatcagaaggacaattacatccacttcatctgtttttattagtgtttggaagaaaggaagcgcattctgagtgagatctttttcatttttccttaaggacattagtaatttaaaaattctatgataattgaatcattgttgaaatatcagaaaatgtgagtaaggtgaaaggataatacacagctctgatcatcttaccatcattatgacatctttgtcaacacatacacattttggcaaaatttctaatcagttattttaaagaaataaagatgaattagagcagacctcaattcctttaactccatttcttctttctaaggacatttggctcaagagacatattttaattcgcgtagtacaacaagcctaccagggttttgggcatgcatgtttctagtttcttcatctattaagtttctgtgagtatgagataatatctggagaaagaaagtaattgatctaaaggacgagatttttagaacttagtttacatgggagatgacacattcaattcaatagcagcaggtggactaggataaaagaggtagcctgacgtctcctgtaacagactctccagttgatgcttttccttgtccaacaactgtatccttgagggaataaacaagagtaatttttgggtgtttatctcagattattaatattacttacaactgtgcaacttgagggcgtttaaacaccaagttgaaagagcagaaatcgttgatacttttgaaaatatttggtatattttcttaggttgactttattctcatttgttatgaattgctatttgaaggcttctacgttttctttcttttttctttttctttttttttttttttttgagaccaagttttgctcttgtcacccaggctggagtgcaatggcaccatctcggctcactgcaacctctgcctcccaggttcaagcaattttcctgcctcagcctcccgagtagctgaaattataggcacctgccaccacgcctggctagtttttgtatttttagtagagatggagttttcccatgttggccaggctggtctcgaactcatgacctcaggtgatcctccacctcagcctcccaaagtgctgggattatagatgtgagccaccatgcccagcctacattttctacttgtatgaaaaactgatgtaaacaaatcttgtaggctcttgaaaaatagtagcttctaaaatgcctctgcctgtcctatttgaagactactgtagtaacacctagcatgagttccctgaaaatattaatgctaagaaaggaatactgtctttacaccccttatagaggttgagcagtgattcttttccagctcactacgtgctgcttttgctttcagttttatccctgcattctcaactcatgactttgttccttggcccaactccctgagcatatcaaggccaaggaatgatttgagcttcttaagtgtcttcttcacctcaaaatgtctttttattttcactaattttctttttttcccgatggtcaagtagaaagatgttcctttctttctttccatattaatccagctaagaggccattgtctcttatatcctttatcatcagttatctgttccccaatcttgatttctactatggaaatttgtttatttgaaagataggtctgaaacaagagtcttttgatgatcttcataacgctctttcctctcaagctgttgttcttcatgcccaactcctggtaaatgtgggtcacttccctatcttcaccatttcatcatcacctcttactttaaccgcttgtttcctagctttgtgccctgccacttagagaaacttcttctcctttgaggttcacacatggtttgtcagtaaacaagaagtcacatccattgtgacttcttaacctcactggacgttgtcagtgacactctttcttatgtatcccctcccctgacttgtgtgaccctgaattatagtatcttgttaattaaggagcatgtatgtgcaccatttgctggcttatttctcccctcaccatctcagctctcttagcccttcttccctaaacataatgtgaaggttttgcacccctcccaggacttgacatactgcccttattcctgagctgtcacctctgtgttagggcccatatcaaaccaattactggacatttacacatttctacctacccttcaaattccttgcaattacatgtaaattcaaaagttccctgctgttataatgtattaattttttatacattgtaaatagattaataataattacttggtaatataaacaatactatttattagtatacattataaataattttaactagtggatacatcttgaagtccagtgagatgcacatttactccttgggttcaaaagcctgatcctttcctaacttcttagatacctcttcattttgcttcttagtcttcattcccaccactaaaacttagttcaccctacaaacttttttactctagctttgtctctcacatctccccttcatttttctcaacacttaatcatcaggtaaagtttcctacaaaactaatttttctccttatcttcacctctgccctattcctttagctatatatttgttcattagtctgcttattttgtatttagtatgttcaacaaatattagatgctaattcattgcctattaaggagattataaaaatgaacaaaacagacatggagtcttccacaaaatttacacactaatgaggaagacagacattaaacaaatacctagaaaataagtgaattatactgtaataaatgctccaaagtctacttcccctccttctgtggggaggttttcaataaactggagtgacagagtgagggaactgacactgtatttgtacatagcatttcagcaagtgaaatcgtggctatgagagtattttaggtgtaaggacgagcaacagcaaagggaggaagtgccctggagtcttggtgaaatgttgagtaaggcagttcggtgtgggtgtgggggatgtgcggaggaggaggggaagtctagcatgtgaattaacagtagtgaacactgtccattatacttcgaagcattttacacgctttatcccaggttttctcacaaaaaccttacaaggaagcgatgttaccccatttttcagaggaagaattagaggtttagaaaggtttattattcgagatcatggacttggcaagtggcacaaccagtatgcagtcacagctctcttaccccaagcttgggctattatcagtaaatttggagccatagtgatcctgtgcgatgtgaggagcacgtggctctttctaggatgctttccttcaccacccctctttggacttctaggtctgtaaatactactttgatgacattgaatctgtgctccttgaagacaggaatcattcatccttgtattttttcagggctcctagcattttgtcttgcctcaaatagatattctataaacagttactgaataactatgctacagtcatcagccttcacatggacatttacattaggaccatctgatatgccttaactgaaaacaattgccaaagcatgtgactggcactgccttcatttttcataattttattagtgcccccctgtttccttcctagggttcatatgtacacaaaccaccagaccaaaaaaaaaaaaaaaaaaaaaaagaaaaaagaaatatatcagtaattctctgtagcaacaacgaaaatgggaaattagcaagcagctcagctcattcagatgcgcagccagctctagggatcactgcttatgtcatttgtatcctatgattaggaatatcttttgaaaatttgggagaggtactcaggatattaaataagaacagcttctaagagaaactcgctcctagcttcttttttttttttttggaggcaaatttgaacacctgaaacattaagaatcatttgggggtggggaatagatagattggcagggcatataaatgtttatttcttgtaatgtataataaaaaaggaaccagtgcaatgggaagcagtggcaagtgtgtccctgagaaagacagaccgacacaaagactgagagccaagtaacagaattggagagagaaaaacaggcgcttagtttaacgctacagaagcaatatgctactttgtgcagagtacacatgtgaagtactccaggtcaaacattggacttctcctagtctgaggtttttgttctttgttgctgccactgctaattaggaacacagtgcagtttgttttctctgtgaggaattcttttctcatataagctccttaggataagatggatgctgttgggaagggtaagtgcttgccatgggcaaaaatatacatagagtaagaaaaggaggtttaccaaaggatagatttggacattttctaagaaaatggaagattataagatccaagagagaaattgctatagaaagattcagagccaggcacaagagagggcacatcttggactctgttactttggctgaggaatgtgttcagtggtgtgcatatgctttcgttatgctgtgactaaatttctttcccacgtggggaaaaaaatggtgcttggattcactgtgcctatggggtggtggtggagaggtggtccagaagggaagagtggtgatgtcagaacatgtttgcattttcagctgtttgcctcacacctaatgacacctacacgctttattgttttgtcttttggaaataaatatacatgtatctcacacagtcatgttggaaataaatggaatatatatagttttgtagagatgaagtcttgctcttttccaggctggtcttgagctcctgtcctcaagagatcctcccaccttggcctcccaaagcactgggattacagacaggagccactgcaccctgtccaggaatattttttataaaggtgtttgaggatcctagcaagatatttttccctaaatgtaaatatttactattgctatatataaaaccaggcttatgaagagataacattttccttaagggaaaaatatgactagacaatatgttacatgatgtgaaattaataccatgttcaattttaaacaatgaaaagtttttcaatagccaaaacttactttgtagggtacgcccacatcaagtgcttctattaagacttcaggtcagttgacacttttttttttttttttataatgttagcaagttccaaactggaaaaacaagggtgttgccagtggaggttgaggtgaattgaagggagggcgggatgccaccaccgcaagccagcatggaggtgctgtggtcagtgcatttcagggatatgaaatgcaaccccacccctgcagacaagagtttcagaatgcattttctgtttttcaggatgaatcttcaagtcatgaatgtaaccagcgcacaatccttctctatggagtcggcaaagagcgtgatgaagcaaggcatcagctgaagaagattaccaaagatatcctgaaaattctaaataagaagagcaccacagagacagggggtaaagaaccttaatgcatttgctcccattgtgttgccttttgccttccctctgagcacagtctttatcaaagtgttctatgtcactgtcaacagagcgtttcccctcctgaatgactctcacattgaaatgtgaacaagcacatttaaattttaaagccttgtttccatttatagcaacccttgtattaaaatattaatacaaggtattaatattaaatattattttattaaaatattgtattccataggtaggtgtaggtaatttattctgatttttggtatacttctcaaattttctatagtagtaataaatgaagtactgaagaatgagttgaaaacctttagtctggaagagatccatttctctgtttctttaccataattttccaagcttgtggttagttttttttctggggcactcacatttgcatgttaattgaaaatcatgacagcatatttgctcaccttttcttgcattattgagaaaaatgattgcagtaggtagtgatggctacctatatctccaaatgatttcaaataaaagaatttgatctttgctctataatgtcttctttagttgaaatgctctttcctcatccttttgacatagtttttacagtgaagctgtgcctttatgttgtatcaccacattgcataattggaattttgtaattatccacttcacgtttgcctaattattcttttcaaggtttgtttatttcattaggcaatcaaattattttaaatatataattaggtatcctgctaccaccactggtgtttatttctctaatacttaaatcatagaaggaaaaagaaagtttgtgtttactctatgtaaacaacattcttcctgcacgtggtataaaccacctctaggagccctactgttctgtagtacatatacttttttatggactcttcacaggagatccagttcctagactttagcaggataaattgctagaatttgtccaccctagatctttactagagaaaaatacagatcttaataatgaagataggttctctttcttcccggtcaatcatggtgcacatgcagaaacatggtacaagaggcagtgtgtttctatctgcatatggcattctgggtatctgatgtcagaggtgatagtcctcagaacacagtgggaaagttatccttcctgttattcacatcaccttccctaactcccttccattcccagttaagggctttgaaatacctcagctctctgaggaagcaaccaagagttgtggaagggaaatgaaaccttcttgttgatgtgtcattattgagtttgaaaaaagaaagtgctctgtctaagaaaactgtttatctgttgttttggtgttttctctgtcttagagaaaagaggaaacagttgcatttagaagattgaatttagaagccctgaaactagctagcaaagaatatttaaaactacttttggtatacttggcaatggggtaggggggagtcagtatttccttcaggaggttcgtaatacatattttatctaaattatttttagagggtctttccagagcctatggaactttttagaaggcttgaggggtatgggaaggggaaggaagcaatgtggtatccttttctgttgagcgtactaacttccttcacagctttttaatgccacactatagtttgtcctgtctttgtagcagtccctcaaataggcaattctagcatatgaactcacaaagcgaaaaacattgttgttctgtgctgccttttgagaaacaggtgaggtattccttatacgaagtgcttgggaccagaagggttttggattttggatagtttcacatttttgaatatttgcatatataatgagaaatcttggggatgagacccaagtctaaacatgaaactcatttatgtttcatatacactttatatacataccctgaaggtaattttatttttctcttggggatgcttaataaactgtgttgtgtgtctacattttgactgtgacctgttatgtgagatcaagtgtggaattttctacttgtgacattatgtctgcactcaaagtttcatattttggagaatttcagattttggattctcagaatagggatcctcaacctttttcagtaaatagaaacatcatctgtggaaccacatcgttgggaggggatttttgactttctttcattttagataaagttccttaaccagaaagctgttaatttgggatgtagtgagctgctgtattgtaaataatcttaattttaagtcactagttaaaacttagtgtaagcaccagaaattagctaactgtacttcatattaatggaaatatgcccacttttttcagcaacatgagtactggtaaggaaaacagaccttgtgttagcatgtatttgatttctgggaacacatgaaaataatattttgaggaaccaactcattaggagtgttgtcagatcagccaggtcttgcctaggggaatttatagtataaagtttaaataacatttccagttgaatgatcaaagttcatttttcatttgccttgaccagttatcttttttggttgtcaatggtgtatcttttgaaaatattagtgaagtttactatgacaacctttaagaggctaaagtttcaggacttaaagatttttaaaaaagaaaatcaaaattaagcaacaaaagagcaataatatgttataaaagcaaattaacataagaaagatgaggaaaaatatatattgactataatgttactcatgtaaatatcattaaaataaagtatttcgttgagaatcaccactgatttcttacattttgctgttaaaatgagtataaattgctaagaaccaattacattcttttacatgaagttttaagaagttagtgatacatagataaatggagtccattaacacaaacaaataaaaaggtgcacttgggagtttttagtaggatctacttctttaagtctgttgttattatttgttttgtcccaggaagaactgaatcaatgcattaatttcacttttaaggcattttgtgcacaagactattgatgttagctcttcagccttggatcaaagatgttagtaaatgaaaaattcaaaacttggttattttaaacatgctcatgacatgtgagcagctacagtgaaggcaaaatttcatacataatttgtacttttgagaatagacattgaaaaaataagcaggtttaatgaatttgttagttcctaatctttgcattatatttggtgttactggccaaaagtggcacaagcttgtaacttatgttaccccagcacctttaaattctgatgtactctagcatcaaggtttctttgttagggaattagaaaagaaccagccttgtggtgttttgttttattttgtttttgactgtaaccactaattgcttattgttgaaagagaagtctcttttattttcatgttattgtttaagaccattacatttgccattagcaaaatatttttgagttcagtgaaatcttgttcatttcttgtgtctttaatagagaaatctgtaaagtaacctttgttctctgaaattaaactttcctaaagaagacgacagtgtgaggagtagaactcttgtcttggtagcctttaactacttagaatcacagtgctggccgggcgcggtggctcacgcctgtaatcccaacactttgggaggccgaggcgggcggatcacgaggtcaggagatcgagaccatcccggctaacacggtgaaaccctgtctctactaaaaatacaaaaaattagccgggcgtagtggcgggcgcctgtagtcccagctacttgggaggctgaggcaggagaatggcgtgaacccgggaagcggagcttgcagtgagccgagatcccgccactgcactccagcctgggcgacagagcgagactccgtctcaaaaaaaaaaaaaaaaaaaaaaagaatcacagtgctagaaatgacattatcaatcatatatccaacttttcctttttgtttttagatttgtctttgtaaacataaaatattaaagtatttaaaagcaggattgaagctagctttggattttattgttagaacagttaagaagagtacccctagaataagcaatgcttattttttttaattggaattttcttcaaacctctttatgctaatttgataaacatgtcacttcttcattaatgtggaatgatttaattttttgccactattaaaaaaggaatcatgtaatttcttttttaaaaaatatattaaactgtgtcagaaaagtaacaagatgagtctccaaagaagatgccaagcaagtgtttgattaagtcaaagtgagcccaggagatctccccaccttcattgtggatatcattgtaatttaaaagttgtttagtgagaaatgtttataaaggcactttttatgatagctaaaatctggaaactactcactagaatggttaagtaaatggtggtacagtaacacattggaatactgtaaataagtgagaattattagtttttagaacacattaaaattacctcagcaacatgaatcaatcttaaaagcatactgttgattgcaagatgccagatgtggaaagcatatactatatgatttcctttatatataaagttccagtgtaggcaatagcaatctaagttgttaggtgtcaggattttgatctcctagggagggagacatgcctagagaggcctgagggagtttctgagattccattctgttactttgcattcaagtcttattgtgtatttattttattgaaattcatagaatttgtgcacttttctgtatgtatgctatactttaaaaaaaagtatccattaaaaatgtcgagagcttctattaaatggaaaataatggatctgctttatgtttatgtagttggggacgaaggacaaaaagccaggaagaacaaacaggagacatttccaacactggagactgtgttcactaaactccagctcctttcatattttgatcaacatcaagtgacatctcaggtagctatttaaagctgtttattatgcatttgcagtattctaatttacttaaaaatttttttcatgcagtatattttctcaaccttaatggttttagacatatattttataaacatacttggaagtatctcagactattgagtagttcttttaagtgtcaggttgccttcctcgaaggattaatttttattatgtactttttttgtccttatgataataatcggtgacatataaagtaatagctaatgaaatagttaggttattagagtttggtcctatattgcaattgatgagaaatctgttgatgattgaaataaaatactacgacattgagaagaaaacacatctgttttgctttacaaatccattgatattcaaatggttgtgtctaaaaattaatatttgtagttgttctaccattagaatacttaagatttaggtctgaatgacaactttttgtattttttaaaattgtagttatgaagaaatcattttctttgtacatagttttatagtttctatagaaacacgttttgactttcgtcaaagtagaatcatgtatagattcaactgtcttaaaaagtaaaaatgatttatcttagtaaaagattatttagaatattggtcttacaatatttttgtttttatttgcacagatttctaacaatgtgctagaacaaatcacaagctttgcgtcaggaacatcctatcatctccctttggctcaccacattcagctcatctttgatctcatggagccagcactgaacatcaacggactaattgacttcgcaatacaggtgtcaaagagaccatgtttctcttacttttaggaaagcaaatccaccaggcattgtgcaatttaaagtgagccaattagctgggcacagtggcttgtgcttgtaatcctggcactttgggaggccgaggtaggaggattgcttgaatctaggagttttagaccagcctgggcaacttagtgagaccccatctccacaaaaaatttaaaaattagctggttgcatgcctgtagtcccagctacttgggaggctgaggcaggagactcacttaagcccaggaggtcaaggatgcaataagccatgatcatacaactgcactcaagcctatgggacagtgcaaggccctgtctcaaaaataaataaataaataaaatttaaaaaataaaaatcaatgaaccaattgctgtacattaacatcattttagggacatagtacaattttgaataatttagacattgtgaattaacagtcttaaactaacattttatttaaagttgtgttcatagttttcaattaaataattatcattggtgccaaaatatataccatttaaaaatgtgagagttttgagtgtttcttctgtttttttttgttgttgttgttgtttttcttttggtctttgttattttcctgaagcaaagatgaaagtttatttgctctttataatagagcatgttttaggttaagagccagaacaaaccttatgatttgatttgccccactgtgttatttcttatgcacatttgagttcattatttccttctgctattagcaaacagaaataagacttggtttcctttgtttattttataggagatattaactttgttaatgaaaagaaaagccaaataactttcattttattaaaaagacaaaggggagaaaagtgaggggtggggttttctaaaattatacagtccaggaccttgcactgccctgaagtttcagtaccttatttcagcactgggtacttcctaattgtatacatcctgatgtctagacagaagaacaactctataaattggaaaaggattaaaaattttaaaaaagttaaatttagggaatgtatttgtagtgtaatgactcagtatatctatggtttataaaaataaatgttttctctatttgttttggcacctacatgtttattcagtcttttctcctgttacagttactaaatgaactgagtgttgtggaagctgaactgctcctaaaatcctccagcctggcaggaagttatacaacaggactgtgtgtctgcatcgtggctgttctcaggcgctatcacagttgtctaatcttgaatcctgatcagacagcccaggtgtttgaagggttggtatatagcatgtcattgttgtttttccaatctcagaatgtataactagtgatgaaatattatagtggctttaaaagaaaaatagtactgatacctgttttagttaaaacatggttaaagaacactcttgccagaaaacatcgatcaaaaaggtctaagcatgtaaagtatgttctttctaataatgtgtgattccttcttcccttcctccttgcctttcttccctctccctggtttctaagtacaaagctagtcatttatagcactctacggttaatgttggccagcatcctggcatattatgaatagtgaatgctgtaacttctttattcatgtaatttcagtttatgtttgcagactcaacatcaaataagctttgcatacattatcatcttagaaatttggttcttcaattgcatttctttgattaaagatatcttttgataagaattaacctagaacaaattacttcattttcagttgtaggctggggcttactctactaatgaagttgagctacagaattagctaataccacccccattaaagactgaggctaaggcaccaaattagtgtaaatgagctctcaaaaacttacataagctgctttttatccactctccagggctttttatttaaacacagaaagacaacctgttatttctttctcttcagtttttccttctgagctcaaaagaatcatggggttctttggttttatagtaccttttatttttttaatctagcacatgtaatcaatttatatgctatcctagaatgatatcaatttaacagtagctattctgggaaagaggaaatgctacctttatttgtattaattacatgttatgaaatgaaatctgaaacatcctaaaaacatcagaatgtaagaatatttacatattagaattcaggaaatagagaattatttaataactcaactactgtataaagtttgaatttagtattattttacagcccaggaaattgagattcaggcctgttaagtgtttggtgaagtgatgtaccctatatcacatagctaataaatctcacagattttaataaaaatctttcgaactggaagcttattcatgctgtttaatctatgttctacttttaaaatagtatattgaaacccattagttggtcatgaaatgaatttaatgggttgtgacaagtttttttgtttttgttttttgtttttaatattgttattttgaaattgatttcagtatcatttagtttggccttgaaaatttttatcctgttaaatattcataaaatcatatttgacattaactttgttgtatttttaccttatattagtaagggtaagtattatgcttaaaactattatttcacttcttcgtacttatgtgaacagtacactggattacgatgtgaaatgtttttcttattgcttgcaaatcaaagaagttgaggaaacactgactactatacgatggatacctaaacctaacagactctgaataaatgtttatttactttagtcacaaaataatttttcgctttatagataatatcaggattttgtttaacttttattttagagcagatttattacaggtttattacaaaggtatattgcttggtgctgaggtttcaggttatgattgaaaccatcaggaagtgagcatagtactcagtaggtagttttgcagacctttcctctgctctctgtctccccacttcagtagtccccagtgtctgttgttctcatccttatgtccacgtgtacctcatgcttagctcccacttacagtgagaatatgtgcttggctttctgtttctgcattagtttgcttaggataatggcctgcagctacatctatattgctgcaaagagcatgattttgttcttttttatggctgcatagtttttggtttgcttgtttatatagttaacaggttgaatcattacttttcttcttaattgtgtgacacttttgttctaattggcagcttttacctgctgctaggtagtcccatctgttgatgtcatttcacagggtttgggatactacattgccatttcctcaagaagtctccttggttccacctatggtacctgtgattccattgtcctccttggcctagacatcctatgttctctccactttgccctttcccctgaatagtacagaggagtttgatctgggagtctggaaacctaagctgttgtcttgcttctgctagaactagctctttgcctttgagcaagtcaccccacctttctgcctctcagagcctcctttatacaataaggatggtgaatcagatagtttctaaagcttttttcgtctttaataatctgtcatctgtgactccgttagtgtaatataatggctgagccctgtaacaaaatacaagatggtgatggaatcagatgcacagataggtgaatggaccacaagtgtttacagctgtggtgtatggacttctgtgttgtatggactgtggacaaagaggcctataactacaggagttatacagaatattacaaaacagaaggggctttatcttcttatataagataaactaaaataaatttattactagttggtatacataggggaatgtatacatgcataaggggaatgtgactccaaaccatgaactgcttatgcacttgaaaatgggttttccagattgactgctttgaagcattgctcctttacaaaggagaaaacttgggaatctttgcacgctgatggaatttgtgaatctgcggaggcaggggctctctacaacagttttccttttgtgtctcagtcccagcaacttaatcggtggattcctccatacgtaccttctttatgaaggaatttctttcattgcttttgtttcttgtcatcagtgacatttctgaagttttttttaaaatctatttcagtgtcataatagaaaaattatattgtactgagttatttactattctatttattagtttcaacaatccaatatcctttttcttacccaagtgatacatattttcattctaaaagagtcaaatgataacccacatagtacaaatctatgtcttatttcttcgtatatttttctcctcaggttgtgtggtgtggtcaagcatgtcgtaaacccctcagaatgttcttcccctgaaagatgcattttagcctacctctatgatctctatgtgtcatgtagccacctcagaagtaaatttggagacctcttcaggtgagtagaagagactcaaaaggacagaaataggatcatgcctatgtttgttagtgaccctgacaatattgtcatccttttgaataatgaaagctaattgcaattgtatctattaggcagtaattttgatatactcatgatttgtttaaactgaatattaaaatagacagggacaatacacgatagtctattacacaatgtaaatgtgtgatcataggttttttttcccccaatattgaaatgatgttaggtctgattttatttcttcaataaataaagtatttcttaagattttacattttctatatgttgtacagacagtgcattttaagtaagtcctactgaagtaatgattatttgatatatctttccattttaagtttaaaattcaatttggattataaatctaatagaaagatcaatgaggcagctctttgtattttgctttatttgtatccctcttgattttgatatctaccttttctgagctgactttttgcattacttggattagctttaatatcctttgggcattacagtgtttcattttttatttcctggtgactcatagaaggttctatagccccattcacttttctagaactttttcagactgtgtttacttttcctcttttttcacaaaaacaattttgctgtttagcaggtaactttttcatgtgttaatgagtttttttaaaatgaccagtaccctcactgaataacattaaatcaatgtgcattaaaagtaggaaacctggtttctattacagattgtattagattcaggttcagcttgataaatgctatctaatgtttcctggtatgaaaaaaatagaactgaattaatcataaaaaggtactgtaaattctgcagttaacctacttgctatcttagacttaaaattcatgacctgataatgatagtagtatttgattcctgtcaatacatcttattgctgaaggaatattttattgtttaatgagtccagaaagttgtatttttataaatatttttattttcttaatactcttatccagaattcgtattgaattatttttggctgtagctataacctttattacaaattactgtaagtgtgagagacaatattctgtgctttgctcttgaaatcaccccactcagaacattctttcagagctatttgcatgctgacttcttcactccgtttgtctttctgcttccatggccattcctacttcaaatagcatccccaacttcctgtcattcgttgtatcttagcacttgctacccccacaggcagcactagggctggaaagtaaatgcttatttaatgttattttgaggacaattatttactatagatgggtaggaggagagtggtagaaggtaatagctaagaaaacaaatttggaatccagaaggaggtagggaaaggatgttcaactaccattttttttcctttgtcatacctcgtatccagtttgtaaattctgtgatctctgccttccaagcatctctagaacctgcccattcttcaccctctctttaccgctgtggatacctctgcttggaccattgcagagttcttctaactggtttccttgcttccacccttaactctaaaacacattttcaacatccactaaagtgatccttttaatatacgaatgattcacaggctttcagtgattttccacccactcagaataaaattcaccatccctacctagccttcaagatctgcagggtcccatcttctcttccacccctttccctctgtttattgtggccacacagacctctttactgatcaaacactctaagaacaacccacagtagggcttttgcactttatcttacgttgcttgtgatacttgtcctcagttacttgtgtgccccactcccacacttcactcacgactgtctccctgagcacaccattttaaatagcacccccatgtcatcattctgagcctcagcacttgctacccccactgtagattctatatttatttatggcctggctcctccttagaatgtatgcttcatgacagcagaagctttttctatttttttcactgctacatcccagtgtcttgaagagtatgtggctcttagtaggcactgaaaaaaaaatctgttgaatgatagttatatctaagacaattcatgtttttaatggtattaataaagtgtgaaaatatgaaatgggttaggtttcaaaataatcctttgtgaaatatttgagtgggtcttaggaaatatctttccacagaaattgtgtcacaatttaaaaatacttaacattcttctcttactttacatagagctttccatttcagcttacatttttcaaagagctttctcttacatgatttagttcttacagcagccgtttttttaatagtgaacttcctcagacagccccagtagcctatttgacccttaatactcctgcagtgtggtgcaaataggttaaatgaggtaattcaagtaacatgcgctgggcgtggggtgtgtggaaatttagggtaccagcacacagtgaatagagtaattactcaggggtcagcagagtggcacatcatagtgattggcactgtctaaagtttcctctatttgaaaaaatgaaagagaaatacaactttcttgggatatcttgaagtcagagacctatttgtagtttgagatgaagaaaaatgggcaaacaaaagctggatacacagagagatttctatcagtatgctgataaaacaactttaataattttatctgaaccaccattcataaagttgtgtgagaggagtatttttttctgaaacaccattcacacagttgtgtgagaggagtatttgggggagatacaacactggtcacctctaccactgattgagctactgctgtgtgccaagcactgtgctgggttatttccatcaagagctttatttctcacatcaacctcaagaaactgaaaatgtcatgactctgaattgcaaacttgtatccttcaatgacaaccaacacattttttaaaatataagttgtctacacagaaagagagtgtagaagattgtaattgctgccatttagtagatgactttagtcctctttgttagagtagtgcttcccaagcattacttggcacttgatttatgtgggagatcttgttacacatacggactctatacacccacagtggaggcccaggattctatatttttaacaaacaccccaaaagtgattctcaaggaatagagctgaaactacattttggtaaacattgaactgaacaatctctgttttcttaaagctattgacagtggcaatagtttagaatagagagtctttgtgacttttcatcttcgagggactcattcctggctgccattgatgcaagtatataacaatatggggtttaaaaaaaaagccataggtcaccacaaaccacaaatacttttgctgccaaaaacttaatctataaaacagactttctgatgcataaaagagcttttgagtagagagagtgaatgttgtttatggatatgctacctacagaaggtaagcacaaatggctaagtttatatagaatctgagattttacatcaaatctttctgccagtctcattcacagagcaggtttggaggagataggttctaattcctgttatacttctagtagtctatatctgattcagacgtaactcactgaaacatgagctgtttttatatgatagagcaggctctttaaaaatctcttaatgcctctgagaaatacaacatgataagtttttatgaatgatataatagttttttcacttccatagaatttgtgtattatccatatccccttactagaatgtaagttcattgaagacaaggaatgtgcctctctttttcacagctgtgccatagtctccagaatagtcttggcacacgaacttctactgcgtacactataccagagaaatagttttgtaagatatgtaattaagagtactcttatgtgtaattgaatctttttttatttttaagtaataacacttttcaacaactgttaagacacagttgttggaagccatagtaatttctttgatttttaaagcatgtaaaatgtagaccatatttaggaaataattaagatttataaccaaatacttcatttctgttttgttcttccacctatttagaaattatttattgaggaatttctacattccaaagtactttgattagcgccaattagtaagaagttctaattaagaactcataatgtgaatcttctctaggaatgcattacagttcctgccatttaatatgtccttaagtgaaatagttttctagttattctagttttatttttctgttttaactttttttcttataacctcagtagtgcctgttcaaaagtaaagcaaaccatatataataacgtgatgcctgcaaattcgaacttgcgatgggatccagacttcatgatggattttattgagaatccctcagcccgcagcatcaactactcaatgctgggcaagatcctcagtgacaatgcggccaatcgctacagctttgtctgcaatacactcatgaatgtatgtatgggccatcaggatgctggcaggtgagatgggttaccctggaattcatgattaaccaaagagttgttgccttggtgcttctttgaaattgatgtcgttagtaagtgtctggactcacatttggctatcatttgctttttctaaatcttcttttattccttaatttacctctgcactatcttttaatttccttaacctgagagacagtgctttcttatttattactctggcatgagatgttttcaatatggccaacaattacatgatttattttcaaaaacatataataaaaatataaataagaatgcctgtattttgaaaaaaaccgtatttgggtccacctaaattacatgatgtctataaattttttgatgcccttaaaaatgtaaatcgtagctcagatttattcacgaaactaaaaatattctaattcgtgtatgtactgattattgtttgttgcttaacagcattgtcaaaaatatttgaagccattgttatcttcttctcaaggttctactaagttatttgacaaatgagtattttatctgtgaatctaagaaaatgacttgtttgatgttagtgaaatatatgttaattaagtatatcacaggtgagtatttctcttttgtacaaggttactttctgtgtcttctttttcttttctaggattaacgacatagccaatttctcctctgagcttacggcttgctgcactgttcttagttcagaatggctgggggttctgaaggctctttgttgttcttcaaatcacgtgtgggggtttaatgatgtactttgcactgtagatgtaagttttctttttcatttaaaaattgaactgtgcaattaaatatttagttagtgggtaatctttttgcttttggcttttatttaattgattcaactgaaatgttataaaatattttttctttctctgtccaaaagcagtaaaccacaatgacattgccagggattaaatacatgaaaaaaaatagaaataaatagaatgcatagtttaatctgtagcagaggggccaagaatttctttgtttcctgaaatttccatttagttgagatttcttccatatggatggtctcttcagagctgttttttctttttaccaactgccctggattcctcacagcatgggacataatctaactaaagcagttcacattctgaagaaggccactttgatatttttaagtgcaaggcgcagtatacaaataaaggctttgttgggttacataagaatgtccaggtctagattccgaggatgtccggtgttttttggcaattaatgcctggaagatgatgaaaagataccccttgtatatatcactgacttccttggatatcatgttgcatccatgatgtgtgtatttctttaaaaatctgtcttgattctttacttctcctgttgccacttattggagtagtctttgtcgtacactagtatctcttatgcatagttctttatacatctttacacctgcctctcagttgaaggttgacttctgaattctgctaatcaggactggttggataatcctatctctatatcttcattatatgaagacttaagaatttatgtatataaaattcatagatgtggcctgcttttctggacagaagagacttaaatttttatctttaatatagtttcttaatctcttagttgtttttttaaattacactttaccttctgcaattcctcatctaaaaaattggaattaataatagtgtgaaccttatggtggtgtgctaataaataaggtgatttttgcaagttaaccatagtccttggcatatggtgcgaatcagtatgaagattgctattgtagttgtttttcttattattttctgccaaggtcacgtgagatctagaaaggtaaagatttcactgtgactgaattaatttccccctctgtcctttttcttctttttaaatttaagagtcaattggaaactttcagagttgtttttaaaacgagtttaatcattaaagaatccttagtagttaccactgaaaggaactccaaaaccttagtgaggcttgtttttcaactagggggagcctcctggtttttccctgccttctaattgtctgactcttaaatggtatatcttgttgcagtctgccaaaatgttttaatgatgttacatcttgtagtgatttcctgattttccatttttgttgttttgtttttcatttgcatgtatgcaagtcaaagctcagtattttcttacagcattggaatgtgggtaaacctcattcattgttttataaaatagaaataggcctagaggataatcatcatgatatgttatcatttccctctgctggttcatgttgggatttgagatcttattggtattgcctgcattctcttagttattaatcttagatactgcttacaaggttgttaggtattaaaacctgtcaatgtttttcttgaaggtgagtgacctttcattccatgattcattagctactttcattgctattctgatagcacgacagtgtttttccctggaggacgtcgtgcagcatgtcgcacttccctctcttctagcagcaggtaaggcagcatccatgaacatcagttgctctttgattgttgtcttgatggagtggtttctaacattacaacacagggaaaggagtatttgagggtatgtatattgggaagtggtgtagtatcaaggtagatatggtagaattttaatagttattttatacaaattaacatgtatcaccgtgaaaaaggtgggaaactgctatgttacagtctgttttaaggaagcaccaagatttctcagaaaaatagccagggccttattttcttaccataaggaaaatttatttaaataattattccaggaaatttagcttaataggaaacctgaaggacttgttcccaagtgtgttagaaaacttgcttttccaatccccctttcctagcttgtggggatgcggacgccgagcctggggcgagaatgacatgccgactcttgcttcatctcttccgagctccccaggcctgcttcttacctcaagcaacgggtgagctgactgcagaaaaatctgattaccttttcattggtagctaaagtttctaaaatgaccaaataggctgtccctttctgtaattgccttcttaattttttgggcatgccctgggggtgatgaagggtgagatgatactattcattgagagggctgtcagcaccttttatctgtgtaatatcaggatatattgagaaatacgaatcaagagttagtaagcaataaaaatacctctgctcttaggccaagccatgctggtgggcagcatggtcctctcacgtactgtgtgtgttggttctgaaccacatcacagcagcttagggcaatggtgatttattttattttattttattttattttattttatttcatttcatttcatttcatttcatttcatgtcatttcattttatttcatttcatttcatttcatttcatttcatttcatttcatttcatttcatttcatttcatttcatgtcatttcatttttttttttttttttccaagacaaagtcttactgtgtcacccaggctggagtacagtggtgtgatctcggctcactgcaacctctgcctcccgggcttaggcaattctcttgcctcagcctctcaagtagctgggactataggcatgcaccaccatgcctggcaaatttttgtatttttagtagagatggggatttcactgtgttggccagactggtcttgaactcctgacctcgtgatccacctgcctcggcctcccaaagtgctgggattacaggcgtgagccaccgcacccatccctcatttattcttgtactaagtaaaaggaataaagtaagaattttaggggcgttggtgaagtctgctcctaaagatcatttccatatagataggcatgtgtctgtgtgagaatcaacacaaatatgtgaaggtcctactaatcttgttgatgtagctctctgaggaggaacgacattgttttaataaataaaaagaaaaggataagtgaggaatactggccatgtttcttagtgaatccatgaagcatcaattaaagcaagctaatggcaattaagcacccacagtctaacaatgaaaggctgactgcctgtaaataattacaaaacattactaatgatggtaatgagactattaaagatttgttgtttttgtaggcaaacctttccctggaataagatcatcttgtgatagacacctcttagccgctgctcacaacagcattgaagtgggagccgtgtttgctgtcttaaaagcaattatgatgcttggtaagattattctgaccctaagcttcttggttaatcaccagaaatgaaggcaaaataatttattttcaggtttaaatctagtagtattattggaaacatgatactgtttgatcgcttattctcctggaaaaattagtggtttctcctagaccaaatacatcagactctggaagatcctgtcccttatctagtgtctctgggggaacttacatgtaatattttttatggtattttagttgcataatgtctcattctgatgtaaaataggtcctcagacccacagggttgttttgccttctctggtggcagaaatcacactttgtgagagacagggatgacttggtaatctaactaaatgtttacattttatccagattatatttcaggagcagaacaccagaaaatctgagtcttaatcttagtatttttgctcctatcatgaccctgaacgagtatatttccttctacctttgttttttgatgacccaggcaatagttgcaatgatgttgatattattgataaatcaatattaagtttcacaataatttttttcatttaattcataatgtccaagatgttctttacatccttatttgtaagaattttcctggaataatagcactgccttttctcttcatttacagggtaatacattaaaacattattctgtaaatcttaaaggctttgaatgattaggaagtcttcaagtcagactgcctaattccaactttgggtaccttcttttggtcttgactcttatgttcagaagtagctccccttcattagaacagaaattactgagtggataggaattgctttagatgagtcctaaataacatgttttgggctataatcttgctctgctttggaaatgttatttggtgatgatgaggaaggataacagaattttcataaaacaagctattaaaacttcaccttaagaaaggatacacacacgggcctgtgaattttgtagtaaaaaggggaggtagagccacgtcaaggaccacagcctcctctgagtgtaggcgcttatagatttatacagccaacattaagtgctcatttcagtgagtagaatttccctactgtgatcatatttgaagggaaggtcagttggtcggttctacttaataaataaatgtagggaccatagagatagggactggcttttttacctgtggtatttctagtgctcatcagagaagctagcaaagaatcagttttcaataaaattatgttggaagtgtgaatctataaatgacaaatatgctaatggcagaaaccaagatgagtaccttctagacactggccccatgatttgtaggattagtctaatctcaagtagaatttgcccacctcttcatccacataatttggaggattccctgggtctaagaagtcaggatcaggtcagtttaacgtcagcagagctttgagccaggtgggcactgaacgctcaaatgtattctattgtcaatgcaattgcagaaggcctggcacagactctcataccttctctgttgtcctaacatctaaactaaatgaggatctcctagtatggggctagcaggtactgttttttctctttcttttcttttcctttcttctcttttcttatttgcagaagctctaatttatccaccctaccatgccctaaccaactctcaattcctatccaccaggatatattttgagttagggagatgggaccattatatcaaatttggtttttaatttctacaatgtaactcaaggtatagaggtagttgtttacatcacctaacggtagtgaaagcatactacattttggtacttgcagaatttagtcttttctttcagctcctgaagtgatctattaaatgaaatcctgtgggtaaagtgaagctggtactctttgtgtttgtattttaatgagaaacatatgattatatattgataaattgaaatacattatttattcctctcctctgcttaagattttgttagtaaatactcagtaagccatttttttcagcaaagtcaaaactttttcttggttgacttgtgggttttaaaaggctttttccattaacttgggcattgttttgcccacttgctgcaagcagtgaaggcctactgtaaaagcatttgttggttccaggaaattttcttgtcaaggcctatgatcctgtgagtaaaaggcaaaagtttgaaggctgtgctgtcatttggcaatccttattttgaatttttattactctctcacttttaaaatatgatagttatttgtctctcatggctagagttttcttatttctagctattcagacattctgtttagtttctttcccagaactttgttatgaagaaaacactttccttagcttcatttcactaagtatactaaagatttatcaggtaaggttttctaatttgtatgttacagagaggaaggtaaaaaaacaggggttattcaatgaatgccctacttttcagggcttccttagtatgcattgcccttttccattcccagggaaataaatctctcttgtcaagaagttgatagtaaggtgggctaaggcaaaacttttctcttgacctatggatagaaaataagtcattgtaagagaagaaatggaaaagggacatctagaagggtgagtaacccattttttccttgtctataagtcaaatgaatttgaatacattcatgcttgaaatattggtgaaaccaatgttctctgattacttagtgtgattcataatggcctttccaagtttggtgaaactataattatacaaacaaaataaggaccgagtcttgaacttgctttttctccatttctgttagaaacttctctgggttcatgcatttatgctcttgatccattctctctattcctgaacaactggctattcaataataatactgttcatatattttaaatccctgaatgctatcctcatttgctcctcaattatttggcaatattttgaacttctgtgattttgcttttgtgattctattacttaggagatgccaaaattggcaataacagtgtcagctctttaaagaatgatgacttcaccatgagaggtttgcgatgtgatgggaatgctgatgatatctggactgcctcacaaaatccaaaatcctgtgggaaaagcatttccatagaaactgccaatttaagagaatacgctagatatgtactgaggactatctgtcaacaggtattctaatttaatttgccttttactttgagtacgtaactcttcttttggagagagctacttacacttataggaaacttgtgcataggtgggcctttttttcttgctcactttatttcgaaataattttaagtttgctgaaaagttgcaagaattatttttaaaaaactcatgtccatcctttacacggatttactaatttttacattttgctacatgtgctttgtaatttgtatgtggagatgtgggtgcatatacctattttttctgaatcatttaagagtagattgtatattttattcttttgaatattgcattatttcataacataaccaaaatatagctattaaacatcagaaaatttagcttttggtacagtaattttttctcatctataggccacagttcgattttattaattgtcccagtattgttggatttgtctgaggtttcctgtagattagcttcagattatgcatccctggccaagatactacagaaataatcttgagttctttcaggtaatcatgtctgaaggcatgtgatgtccatttgcacctcaagggtgatgttaattttgattaagatgtttccattgtatagtttcaagattagtaactatacagtggggactgtgtagttactaattttccccttgcagtaagcaatctttgaggagatacttcgagacagtgcaaattttcttctccttgtttaactcccccacccctcataagcattcattttcattcttgcccagtctagtctttactatgatggttgcaaaatggtggtttttttttttccccaacttctcctctcccttcataatatcagtttgtgtcctattttaaggaagagcctgccctcctctcccctgtttatttattatccatatgggttataatatactgtacttagttattttcatgttcagactgtcccagatttgtgcagtaggaatctattcatcctatcacatcatttgacattttaaaaatagttggtattttcatagtttctggcccatgttgtactttctctgccccgggcctggaatcaactattcctccaaggagcccttggttctatttagcagagaacgttactgagaaaccaagatctgggtattatgtatgctcatggttatggagtatcattaattctacgacctgtctgcagacaaagctagaaagaaaaatatatccatacacttaaatatatgtaaatatatatatttatgaggtcctactgataccttcaattccaatccaaccccacaaagttgttctgtgttttcccctaattcatattagtatcaccttcttccctagtaagaatgctgattcccaaaaacgtcaatttacttgtttgtttaattctatgatacatctgaaatagttttaaaatgttacacatggccgggcatgttaaatgtgctatccagcgctttgtcaaaaaatgattaattaaaatacagtatcaaaaatgtacactaggctagggcgcagcggctcaagcctgtaatcccagcactttgggaggctgaggcaggtggatcacttgaggccaggagtttgagaccagcctggccaacatggtgaaaccccatctctactaaaaatacaaaaattagccaggtgtggtggcacatgcctgtcatcccagctacttgggaggctgaggcatgagaatcgcttgaaactgggaggcggaggttgcagtgagccgagattgcgccactgcactccagccctggtaagagagcaagactctgtctcaaagaaagaaagaaagaaagaaagaaatgttacacacataccactaggaagaacaaacctacctaaaaggctttgaagatttgtttgcaattccattttctctaagggtttaaaatactgtgttcaaaaattatttgaacttttcccatccctatgagtgtattctttatgtgaaatagaactaggttcatttggttttgcattatttaaattcctttcttgtccccagctctggctatagaatagcttactttcaaaagtgaaactatacaaaaaagtatactcagagatgtgtctccctcccatatccctcttaccagatgatccagttttattattttttggtttattctccctcccatatatttgttttaaaagttctcttataaaaaaaaagtgacataccttatatattattttgtactttgctataggtgtcataccgactgggtcatgtttttgtatttttacaggcatgttataactatggtaaaagatagctacatagtcatataagtattgagaggcaattgtgtgttggttcccaactgtgagtgcatattggaatcagctggggcatttaaaacaatttggatgcctaaaaaattactgatatttgggtgccaccacctgagtttgacttaattagtctgatgtgggccctgggcatggaattttataaagatcccaggtaattttagtgggcaaccagcattgagccactggtatggtggttaaaaaacagacttcacccgaaatagatctgggttcaaattgggctctgttactgttgatgatttcttactttatttagtataataatttgcctttgaaaaaaatggtaaagaaaaggcaataggagtttaaattggtagaaactcttcagagggtcattaaccccatgcatctatagccccccactcacactggacccagcaattgcacttctatgaaattaccctaagaaaattattgtataaaaaagagatgtgcactactactcatttataatgataacattattcataatagtatcaaaaaggaagatcgttttctaaatatttgttatactatgttgtatctagtcagtgagatagtacaatgtattccataaaaattatgaagaacgtatatctgatagaatcattatatagcaagttagaaaaaactgacacaaaatagtgcctagagcaagaccttactttccagttaaaaacatactaatattctctttattgtcttttcttttttcccattaaaaaatgtttttaagcaagttctactttgtattttttagaagccaaaatgctaaaaattttgttttttaaaatttttctacctactttttaatgtaattttttaaattggaaaattcctatcagttttctattcaattatgcactgtggatttagtacatattgcatatatatataccgaaagccagtgcctgtcaatctaattgccatattatttttaggaatgggtaggagagcattgcttaaaagaacctgaaagattatgtacagacaaagaacttatattggaccctgtgctttcaaatatgcaagcacagaaattactgcagcttatctgttatcctcatggcattaaagaatgtaccgagggggacaatctgcaaagacagcacattaagcgtattcttcaggtcagtcgtatacagattgtgtttctgtcatttgataaattcttcgtaataataaaaagagttacttcctctctttttttgtccttgctaatttgtgatttcaattctgatttttattcccacacattttctgtggaattgacatactttatttttgggtggatgtacatgctgcaaattgtatatgatcatcaaacaaatattgatattttaaatcagtattgtatttacatgagaaatatgcttcagagaggggctatgttaaatatattattaaagaaatattgaaatcattttggattgggattggttaaatagattttgaaaggagaaatgcttatttagtttcagtgcatagctgagtcaggcacagtattaactaattaataattaatgtttctgtttattggtttgtatcgctactgaatatatatgcagcaagattgggaaccttttgactcatataaattatttcattgtgtatgattattctgctctttcttgagagaaggagtactgtaagaaattactgtattttaacacatttgatacccataatgttttaattctttccatttttcccagaatcttgagcagtggacactgaggcaatcctggttagaactccagctaatgatcaaacagtgcttgaaggaccctgtgagtttatattgaaagcttatctctgtatgaaattttataaaaagcaaaaacacgttgatgtttgaggataaaggaatacacatatgtgccagtattcttatatctaactctagggctctggttctgtggccgaaatgaacaacttactggacaatattgcaaaggcaacaatagaggtattccagcagtctgcagacctaaataattcttctaattctggcatgagcctcttcaacccaaacagtattggaagtgctgatacaagtagcacgagacagaatggaataaagacattcctaaggtatttttgtctgttgttttattgaactgtcatgaatttttcacaagtaacggtaaattttgtgtagcacagtgatttttctttaagtcataggaatgtgaagaacatagttacttgtaagcagggattattattaataagttaatgagtaaagctggggtgaatgatagcttcggaatatttgattgagtaggcttaaacaccttgaaactgcaggtgaactcaggtttggttcatgctttcagtgtcccttagtctactgtgttacgtagtattcattatatgggaaacgctttttccaccatttttattaattaattattttgcacaaatatatcctggtaatttttgtgcagaattagaaccagtaggcatataaagtcttaaagtaattatttaatcatgaaaggctgatttgtatttcatcattttggtataaagtataactagcgaattttaaaccttaaaaattagctattagtatgcttacatataatatttcatattgtaactgtgacagaaaagtatattgtttgttggacaaagtgattgtttttaattagagagagggggtcatcggaaaacattaaagtcagtttagttacaatatccttccagaactgcatgttttattgctttctgtaggcttaggtggaaagctcatgcaaatgtctagtgttcggaaaaaggaaagataatacagaaataaaagggaaattttagaacagtctgtgtgtctcatacatcaaagtttcgctttggagtttctgttataactgtgagagcaggggaaaggatgctttctccggtgtaacacctgtttctgattttagttcctccgaacgcaggggtgtatggttggtggcccccctcatcgccaggttgccaacttctgtgcaaggaagagtgctgaaagccgctggggaagagctggagaagggacagcacttgggttcttcttccaaaaaggaaagggacagacagaaacagaaaaggtgtggctggaagatgggcgtctgtgtgagagtttaaagaataattgagaaagtctcacttcctgtaaacctgtgtggtcactgtacccacagtccactgaaatttagtttttaaatggaactgggaatattctattaggcaaggctgtcttattcctaaaaaatttcaggttataatccttaatacattagttctcaattctgcctttatatccaaatcactgctgaactgttaaaaacagtgatttccgagacccgctttagaccaactgaatcagatctggatagctacctgatccctgtattttatttttaattatttctatttttttattatttagatatttatgtttaaaataaatataatgtataattctggcatgttggtgtctgaactagttgctcatatttttaacatttagggctcctgttctagactagacattaagactcctcggccaccacaactaatgttttcttaatttattttatgcccaagaaaaggtttcaagtaattatatttgaaaaccgtgttactgagaaagaaagaaacctcaccctaatgtgaaaatgccaagaaacctaggagtaaaggaaaaaaattgataatttcttccattaaaaaaatattttaagcacatagatttcttgtccactaatgaataatactatagtagccaccatttattgactgcttacagaatggcaactcctctctaaaactcattatgtacatgagcttttaaaattcttatagcaatcatgtggtaggtactctcattatcttctttatatcatgttgaaacagacacttaaaggttacatgagttgctccaggacacacagtgaaggacataaagcctgggtttaaatccaggaggtctggcttctgagcttgtgctcttaactacagtacattttggtagagacccagcattgtatgtactgtatttgttttacatctggttgttttaccatgttggccaggattaattaaccaacaaggaagcataattctaattttcaaatcatatttgctgataggtgagtgtatgtgcattgcctaacttcccataggcaggacagatggtattgaagagacttgaaagatcgctcttcccacatcaggggctctttattctgcccatggagaataatgctgattgaaatattttggcctaggtctcattttaagaaatttgtctttccaacatggcgctttgtttgtcaatatgatttgttgattattctctaattgaagacattttgttaaaatgccaatttaaaacagaatttttaaccaaatgccttgacacctctttaccagtggatgctgcgggctatgttggagcctgtgggctgtgttggagctgcacactaggggtcgccagcaagtacactgtttttggagtcctcagccctggctgatgaattagctctactaacaccctgctttttggtcttgggaaatgtgctgaaaaacaaaatcaaaccccaaaacaagctcaacagacatatatataggcctgttttcccagactctaaaacaagagttttatatgagaactttaaaaatttttaattttatcctgtgtataaattgatattctttctgatgtacatttttaaattctgcatattgatgtagaagatgaattcactgtcttctaccctcactgcccggcatgctcacatgcagtatggattgatgctagtttgagaatggcttcgagggcaattagagcatacgaagtgatttagaagcattacagtggcttttaattttataagtagaggtatgatttaaattttcaagcagtctttggctatttaccacctctcttatttatctaatagtgaggcaaagaaatgaatgttgccagaggaagtaatgcattatttctaactagatctgttgttattattacttcctttgtagtatgtctcttttgagtcaacaacccttcctctcactggtacttacctgccttaagggacaagatgaacaaagggaaggcctcctaacatctctccagaatcaagttaaccaggtaaagtatagtataatattaagacaggcaaatatctttctaacggcattcatttatttgcctttcaaatactgagattaaattaataagggccaggtgtggtggctcatgcctgtaatcccagcactttgggaggcggaggctggtggatcacctgaggccaggagttcgagaccagcctggccaacatggtgaaaccccgtctgtactaaaaatacaaaaattagccgggcatgatggtgtgcgcctatgatcccagctactcgggaggccaaggcaggagaattgcttgaacctgggaggcagaggctgcagtgagctgagatcgcgccattgcacaccagcctgggaaacaatagtgaaactctgtctcaaaaaaaaaaaaaaaaaacaactagtaaggttacaaaatgttttgagtagacgctgagaaacaatccatgccttattcttctacctggcattgtagacaccacaagattaacaactttatattaatgagatatatacaataaatgtgtactgcctataaaagtaaaattttatatattgcatataactttgaactatctgcccgtctcctaactctgcctcataggagaggacctggagcaatctatgctgcagtaggcatggcagtgagtccagctcctcaagcttggatgccacattatcaggcacgctttcagcttgaaatctgtaggttcagaaactcagttgtattgatgccaaccaagtacacaagaaataaatcagaaggcatgttggtttatttagaaataatttggacattgccttttcaccaaacacagttctcctggtcactgtttgaggctcttgcatctatgtactataaggaaactgagcattcacaacagaaattggagagcatggaattaagcaaagtggatagattggtcttatgaggtgttttatcctgatacacagcctaattgaccccttcttgtggcactgtgtttctatgacaccatgtctttccctcgaatggtactagatggacatggacaaggacacttaatcttatttgatcctcttgtcatttctcaccttttgggtaggagagatctagatatagcaatcatagtgaacctttttaaatggaagtcacatattacctcagtatacctagtataaaaaattcgggctgataaggccagacatgatttgacactggctctctctcctaccttgtctcctaccagtcatggccctctttcctccatggttgttgcactggccatgttactgttcttgaacttgctgagcaaattctcatttcagtgcctgtgcatcttttcttccctttaggtggaaagattcccttccagagattagcatggcctgctcccttcattcagttctctgttaagatgttacctccttcgggaggcctttgatcacctctaaaaataggaccacagccattctgtatgccattgccatgcctcaaaccacttgttacacttagttttatttgtcccactactattatttgagctccatgagagcttgttgtttagttaactaccttgcccccttaagccagccttagggaggggttcatttcttctgatgagatttgggaagtgctttcctctcaccttgcagggtacttacaggtcatctgttgggatggagtacttctgcatgtgactcatttgaactcttttaagatgactctcattaatgaccatatttcagagcatgatagggtttttgttagtggttttttgtttttgttttgaattgcactttttttttgctcatctcatctgattttagggtgttgcccacttgtggctccctttcctaagcaaatttttccttttccagcattagtgtgagtcagtgaggaagtgaagaagcagcccactttataaactgataaagccacttggctgatgtctgcaatgccatatttttcaaagtaccgtgcgttctctttatcaaggaagacacatacataagatagcagaccttctcttctataaaacatcaaaataatacatttgctagggttcagcaagtccctagaaatataacaggactgaggcaaaatgtaattctctctctccagtgtttttcttcgtaagatcaatgaggtaatgtattttaaaagtttttattaatgcttaatttgatggccctctcaagcattttcccagacttaatcataggctagctatataattatataagattttcttcctccacctagaacggcaaatgcacaaataaatagccagatttctttctgcatggaggaagaagaaagctaaaattttatttagctttgtttgttaatttgttaaagataagaagtggttttttgctatcagtataaagctcaatttatctttaaatgagagaaaaattaaactttaatggggagtttttttccggatcttagattttaagtaactggagagaagaacgataccaagatgacataaaagcgcggcagatgatgcacgaagcattgcaactccgcctaaatttggtaagtgacatttctagtattttccctccattaaacatatttacatgtgaaaatacctccagctttccacttctcctaagtgcaaagtctgcattacaaggtgaggccttccactctttgctctctgtaattacttccctgtttctaaagccttctgtttcccttgctgctttccttcctgtctggtcagacatctagacagtgctaggtattttaagcatagatttgccttctctacctctaccccagtgaatctctccttctcttcagtttgtgctaagaataaatctgagaagactgttataagtgttagcttctactatacttacttaaaaccatttaaaaagtcttttaactcaaagttttgtccaactttccatcaaattgattataaagacaaatcccacagagaagttttatagaaatttaaaatgtctcacatattgtgcattccttgagttttcttttcccatcaggcaggcccaagtgcaggcccctctggaggatggcctgcctgatacttttgcagttgtttctaaccttgtcccaacacgtgaactggtaggtgtgcgggccaagcctcctgcccaccactgctgtgatagtggatgtttccatatggtattatgatagcaggcttagattcaatagtaattgtacagcaaacacaaagatgcagataattggattacatgactttgacattattcaggtttaattcaactataattgcatcataaaactggacatcataaaagatttggaacaaaagaaagctaagtttattggtgcccacattcagatactcacgtcccttcttcattttagttaatgtttgaatgactgaactgtgctgaaagaactaaaaatagtgataaacatgtaggtaaaagagaaaagataaggtaatctataaactagagcatcccttgtttttttaaataaaaaacaatcaaaatttgataacataaagcaatggggtgttctttctgttttacagaatgcaaatatcttactgtattttgtctgctaggtaggaggaatgtttgacacggtgcagaggagcacccagtggactacagactgggccctgctactccttcagatcattacttcaggaactgttgacatgcacactaacaagtatgtttttatcacttcacattgattttgctacatgtatgcatggtataagctttgatatactgatggcgatttctgccacatcttatttacttggatgctattaaaaattctgtgccttgaataaaaatactcagttaaataagtgtatttcagtttcactttaagatgaaaataattattttctttcttagtgaattattcacaacagttcttgacatgctgggtgttttaatcaatggaacgttagcctctgacctatcaaatgcatcccctgggggatctgaagagaacaagcgtgcatacatgaatttagtaaagaaactgaaagtaagtttgagatcagcctgtattatgagctcaagttgtttatggatttattatctagtgcattttaatttattactcattaaatgttattaattgtattcaacttaatttaatgtgattatttgctatttgtttcacctaaccttattagtacccagaagttacatgcacataaccttgattattttttattgaaaacaattacattataaaacatgtttaattttttaaagaactttagaaatccactgttaaatatataaccagaatactaacattagatagatttaggataactctatgcttggactggcacgtgtaattgaaaaaatagccatctgcattgaaatttataaatcgattcatttgaccgaccactaacagactcctttaaaaaaaaattgtaagaaaacagtgcaaaaaagaaaccaaataaatctgatgcattaccaatcaaataaatcaatggttaccttgtaatctgaccctggacatgagaaagtgttctgttctgcagctcctgtcttctgattgtgatcactaccctggatttttgtcatttcagcactatgatgtttgttgtgtaacaacagtgcctttgtatgtgttctattttctacttaaatagaagaaatgaaacactcattgctctatttggaactgccttgtagaacatgttcagggttaaagaacatgcgctaagctataaaaagggaaatgtttcataggggaacttccttctggttaacttttgccttcattgtaatttctgtcccacttctcactctctctctctctcttttttctttagaaagagctaggagacaagcgatcagaaagtattgacaaagttcgacagttactacctttgccgaaacagacatgtgatgtcatcacttgtgaacctatgggttccttgattgacacaaaaggaaacaaaattgctggatttgactctatagataaaaaacaggcaagagtgaatgttttttcttatatataaatttatttacaaaagatgaaatacttttttttgtcttaccataggatatataaaatatatgaattttgctgttgatgtttttaaggcatatgcttgtcttctaagtgtacttagtcattggcattatcatataaagaggtcatatctttgaagatctacgttttatatgtttaaaggacttaaaatgtttccctgaatttaagtaaatttttggaaacctaccaagagaaaactaagtaaaagcttagtgtaaaaaaaaaattgcataaataagttctgattatacttcagatttagaagcagaatatatttatcaatgaaaaatttcttgtaagctgagcatggtggcacatgtctttagttccagctacttgggaggctgaggcaggaggattgcttgaagccaggagtttaaggctgcaatgtgctaggctcatgcctgtgaatagccactacaccctagcctgggcaacaaagtgagaccctgtctctggggggggaaaaaaaaaaaaaaaccttcctgtagtaagctatttcaaataaaaattattttaattgttaggatattctctattcctatcaagcagtatttaatggacatttgttttatataagatattaaagatggttctctaaaatatgagaaaattggtcagttactcttttaatgaacagtaagcaaccaccgacattccacaatcaccaagatgaaagacagagttcctaccctcaagggggaagtagacagacaattacagtgtaatgagatttgtgtgacatggtacagagagagtattaggggatagaatagagggtccccaggaaaattgacacgagtcattttgaaggattaagagttagctgggaggtagggaaaattgtggtacaaataaagggagagtttatatgaagacatgaaagaatcagatttaccagggaatttagagtagcctgagaatctaataccagtttgtgtaaagaaaaaaagctaaagtcatggtcaagtttgagtttgcagtgtcagcggacttcctggtagtaagacatctggaatccatttggatgtgtggtttttacaccaaggaaaaagttctcatctcaagacaaatattaggaaacagtcaatttacaggtggcaattgaaccttggttttattttgttttactttgtttatttatattttttgagatggaatctcgctctgtcgcccaggctggagtgcagtagtgcgatctttgctcactgcaacctctgtctctcgggttcaaacgattctcctgtctcagcctcctgagtacctgggattacagacatgcaccaccaggcccagctaatttttttttgtttttgtctttgtttttttttttttttcaagacagagtcttgctctgtcacccaggctggagtgcagtggcgtgatctcggctcactgcaacctccacctcccgggttcaagcaattctctgcctcagcctcctgagtagctgagattacaggtgcctgccatcatgcctggctaatttttgtatttttagtggagacggagtttcaccatcttggccaggctggtcttgaactcctgacctcatgatccacctgcctcagcctcccaaattgctgagattacaggtgtgagccaccacacctagcctttttttgtattcttagtagagacggggtttcaccatgttggccaggctggtctcaaagtccttacctcaggtgatcccacccgcctcagcctcaccaagtgttgggattacagacacgagccactgtgcctggcctgaaccttagttttagatgaagctactcataaaagaatgcgtatagataacaacagtaacacttacatcttagggaatgactgagtagttatttgggggccatttaaggaaaaatatttttaaattgacattttaaggcaagtgccaagagatgtcaccaattaatgttaagaataaaaagagggtaaccgtttttttttttctagagtcagtaaatataagcttgagttgaaagactttacttattcctgctgctacaatttaattctctaataataatattatattcagagtatggcttattaagtacagggcccacatattgaaccaagttcatgcagatttggattgaagttaatactaacccaattacaggttgactataacttgactcttaaatttgatattatcttcaaaattataaatagattacagagatttagaactggttataatttagtaagattaactttgcagtgttagaatttttagcaacaaatttttagaatttttttagcaaaaagaggaaatacacattaacaataaaatatgctagactgcctctgttgcctaaacagagcatcatgtggttaaagaactgtagaaccgggcttacaaaggtctgaattctagccactgctctccggtgatgtagctgtgtaaccctctctgctgtattctcgggttctctagggctcatgccagccaaagtgttctctgactccatgtcccatacaagcctggcctatgaataaggaaaagatctgagtgtgctatcttagagcgctattttcccacagggtctccaggtctctacgaagcagaaggtgtccccgtgggacttgtttgagggtcagaagaacccagctcctttgtcctgggcctggtttgggacagtccgagtggaccgaagagtgatcaagtacgaggagcagcatcacctcctgctgtatcacacacaccccatgcccaagccccgcagttactacctccagccactgcccctgcctcctgaggaggaagaggaagagcccacatctccagtttctcaggaaccagaaaggaagtccgctgagctgtcagatcagggaaaaaccacaacagatgaagaaaagaaaacaaaaggaaggaagcgcaagacgaaatctagctcaagagttgatgtaagtggggaaaggaaggagaaccttggctcattagcatttagtatgagatttactcgtgcccaaatcatatccctcgaaacattaccaagagcaggataagttttgttatgacagttctcctaacaggtttctgcattaactgaatggcacacaatgacttgtcacagacaaaagattaaagcttttgattttccgtcctccacttttaataattttattttaattgtaggcttccattgtaatatttaattaatatttcagtgcctcctaatttcctcgggtttgaaacttgaaatttttagaactatacaatcccattctctcacatatttttaatatgtctaaaatatttattgtattttaagtggttgatatcttcagtaaattaacataaaaagctctatttggtttttctttgataaaacttggagttagcatagccaataggatgttcctgagattttatgttttactattccatcttaccctcatatattttccttctttaccatgttttcagactttataaaagatgaaaataagcctaatttaaaatagttttacttcttgtttctctattagtgttccccacgtataataatcttttcattacaacagaaatctatttgatggtgatttagaaataattttataaaccttgagaagtaatgcataaaatgtttttctatttaaattaaattaaaacctggaaaatatttgatagaggatttgagacatttttaatgaaattccacagcattcttgctgcacagtggaagaaatattcaccatttcattcagatattcatgattggttattgtttacctatgtgagaactaaaatacatcttttcctagctgatagcttggtgattaatactattttagaaatgaccaccaccactttaggatgccacttgagcatcagtgcccccttctcattcagtcttcctaccagtattcctttgtcttgaagggaagtttaaaatggtccagactgacactccctcaaatttggggtttccagcctgtcagtccacgtggatgggcttttgttcttttctgatgaaaaagccctgaaaccaatcctgctccccaggtcagtctggtcatgtcccctcttcctctattcttcctgaagctccctcttttcaatgagatatgctcttcagtaaaattgcagggaaatgagattttgtttctcttccatcctctagggctagactagatgagggaaggtagggaaattgagaccttcaggtgtgatccttacaggctttgcagctactataaggaagaggaagcatgggggatgaggggagtgtctacttctttagaacgatgtctggaaaattgcaagtgaaataccatcttggccaaagagtggttctgaagcactgtagggctctctggcgtaattctccagacccaagatattggaaaggccttctaagatgaaatgatcatgagtcttagcaactgaaggtgctttttcagtgatgagtgtcgttcagtattggtattcctgacacacttgtagtcttttgaaatagaattcagaagagatccttttccatctctgcccactgcaagccaagcactgtttaagtcaaggaaaagtttacctcaaatgaatatttccaggggatttattagcactcttccttccatcttctcctttataaaaaacagctttgtacattgggataggaggtacctcagatagcttactgaagttatttgcattaattagctgtgtgatatgtggagttacgtaactttttaaaaaactttatgttgaaggaatatccacagagcaacatataccgagtgcctcctaattactcgcctatctcctcccaaatgatgcaccatccacagtccaccttgtggggttacaacctcgtgggccagccccagcagcccggctttttccttcagaaccaatctcttactccaggtatgtgatgagaaagcacagatcactcagagatgagaaacagcttgtggttctctttgcttttaacctgaaacctccacaaaacttggacatttcaaccactgagtgctcagttgacatttctgtaattcccttcacacagaaatgttttttgttttctaaaataggttaaattacgagtttatgtactgattttggaacttttatttagtgttaaaaggaaattagctagtgatgaaaatctaagctgtaagatataaaagttgataacggttttatgttataaaatgtgtgtatttttatcagatataattcttattggcattttaaaagattacacaatattgcacagtgtcttttattgttctgaattatcatgacagctaagaaaattggttcagcaagatttagataacaacaaggaaaactaccatagtaaatgttcctgattttagtattgctttggttcaagcccaagtagatttctcgtcccaaatgaaaattttctaaatgaaaacatctcttaatgaaaaatgaattcaattttctttctatatgaaacattgcatgttttagcatatttaaattatttgaaatctgtcagcattgttaggatgtgccattttaacaaataattttttaaatttttctattgtgatttttattataacttgagtttgacattttgaggtctgtggaagaaaatgtttcatttatggcttatagcagggggaaatccatattttgtcctctaaattaatggttaaaggaactggtctggtagttaagcgttttagattcaaatctggttctaccactctcttgctgtataatcttggccaaatcttaatttctctgtgcctcattttggtcatctgtaaaatgaatatgctaatacctattcccatagggtgggtgattcagttatttattcaagaatgtattgagcttcatgatacagtggacccagttttggatgctaggatattgcagtgactaaagtgtgcaaaatacctactttttaaaagatgaaataaagtttatgttacacacacatacatatgtaagatttaaaagtaaattgtaatagttatatagccttttgaaggtagcctgaccccacagacatgttcagtaagtgatcttcacatattcctagctcagggcatttgtgcttgctgacccctgtgcctgcagtgctctccctcaaatatctacatcacttcctgcctgtctccgttgggcttggtcacattactttctcactggggcctttactaacctgttttaaattgtagacccataccccttccctgtaccctctgtttctctcttttttctgtttctctgttgcaagcacatccaatcttttggcttccttgggccacattggaagaagaattgtcttgggccacacataaaatacacaaacaataggcgatcaactacaaaaaaaaagaatcacaaaaaaaactcgtaatgttttaagaacgtttacaaatttttgttgggctgcatacaaagccatcttgggccgcatgcagcacacaagccatgagttggacaagcttgctctacagcatcagacttgcttatatcttactttcttattgatttattatcttcccagaatgtaagcctcgtggcagatatttttcctattatgttcactgcagtatccccagaacttagaggaacctctggctttatagtaggcttttaaaaatagattgttgagtgaatgaatatagactacaaactagactcagagtgaaaaagaaggatgcaatcatcatccttttaaacttcctctttttaatgccacggtccatgtgaatttttagccattttaaactttggagatgtagaagtttgtttgtagatgtagaagtttgtttgtagatatttgacacacaaggactgtctgtgaattgaaagctaactactttgtaaaagcacataatctctccctatagaatactatagaaagctttttataaactgaggaactttaggtgtgagatggcatttaaaaaataaattttgggctgggcacggtggctgacacctgtaatcccagcactttgggaggccaaagtgggcagatcacctaaggtcaggagttaaagaccagcctggccaatatggtgaaaccccgtatctactaaaaatacaaaaaacaaaattagccaggcatggtggtgcctgaaatcccagctgcttgggaggccaaagcaggagaataacttgaacctaggaggcaaaggttgcttgaactgagattgcatcattgcactccaccctgggtgacagagcgagactccatctcaagaaaaaaaaaaaaaaaaaaaaaagtaaaaataaataaataaataaattttgaaaaaaattatttttgaggatttatatgagcaaatttattttcatttaaacaagcacaatctaaagttacaagacagtatgtacagcatgattccattcatatagggtttaaatgcaaaacaatctcccaccatcactcacatacaaaaacatatgtatctttcctaatctttctcatatatacacaccagtattataaagttgtaaggaaatgcataggatagtaaactccagattcagagtagcatttggtaggagtaagtgaggaaagtaattaggtgtacaaagggcttcagccatatttgtaatattttattccagtagtttctcagaggtacaagatcatagagttaggaaaatttttaaaaattagattatagtttaatctttaaaaagaatttcccttttctgtaaatgagtctctttttacatatcaatatacataattcttaacacgtaatatatgttctgattgttgcttcaatagaagttacccagccatgtgttacttagattgatcttctgtttttttccaaatgctcttcaaatgctgctgaatgactttgtaaatagaagaagatggctgaggcaaatctcactcattttagaggtttcttgtgccaaggttgaggacatgcctgggagaaaggaacacagaatcacaggaacatctctgctttttccaaagaggatttgggggcttccgtatttaaaggggaaagagtaggcagtaggggaaagaagaaagaaaaagaaggggaagtagataaaaggagtaagcagtttcattctttagaggctttgatcagcattccctgaatctacattttacatatgaaagaagcaggttaaaggtttagtcaattacggtgttgaatctgcatttttacataagattaagtaaacatagagtagaggaagaagtcaagtatatatttgtctctgataagtggagggatgacttctagttctgtcctgctcccccacaaccccccctcccaccgtaaagataagctgttaattttagggtaaatcttttggaacccacaaggaatttccttgtgagcaaattatgagggagacctcctagggaggtatatagccttctatctttgtagctatctatttaggaaacaaaccaggggatagttttgcatgactcagttcccaacattgacttttacctttgtcatagtgagtttggtgtcccaagatttttagtttcctttcacaacttcataaattgtattgctgattgtggcactgagtctttaaaagaatgtgggtttttccaaaaaaacagctttaaaatgtttgttttcatcatacaccttgctttatagaaaagataaaacaacttttgtgaggtgcttatgtagaggtttttttcatttacatgtatcaaggactatttttggtgaatgaagaatttacatttattgtgaagccagcaaatgtcgacttttttttccctaacttttaaatgcgcgtgacaaattataatatacaaatatgtaaaggatttcctgtggtttcttaagcatcggtataatagttgcttgtttatttgatttttagccttcaaaaaagatgttttgtcattacaatcatagtacttgaagtttgcaagcatttcaagattttaaagtattttcatgcctctgctataaaacaggcattttcattttgccatggtgaaaagactttaatgacatgagcttcagatttgatgaaaagtacaaaaggatttatatgaatggcttaagaacttggcaaaatacatcacaaaggcagtatgttttatacaagtaatatgttcctgagggccttgcctaatttaaaacccatgtaattatgaaattatgccaacaactgtatgttttacacatttcaatttatgaactgaagacctccatgaaattaaagtagtataattcacttctacatcactcccctcatcttttgtaagttatgcaactcaacaggtctataatatttgtggcaggtgggacagtgcatttttttctactttgttcataaagtgagacttagaaggtgaaatttctgtgttttgatacataaaaagacctgttgcattaacgtagttagaaagtgtttccttttggttgcttttgtaggtggctccagattggaccctgcaggctcctttgtcccaaccaacaccaaacaagctctgtcaaacatgctacagcggcgctcaggcgccatgatgcagccgccttctcttcatgcaatcacatcgcagcagcagttgatacagatgaagcttctgcagcagcagcagcaacagcgacttctcaggcaagcccagactcggcctttccaacaggtttgtccagaccccagcaatggagtcctttgcattttattacctctgctagcttgggataagtttgggatatgtagcatattctttctgtatgcatatccctgtatacttgtgtgagtgcaggtctatctctctgttacaggcttgtaaatagttttcctccattgtactttactgttatcattgctcaaataagaatttgatatgtcttaggtttattaaaagtataccttaaaacaaaaagaagggctgatgactttcggtcaattagaagaagcaggccttttatccttgaggtgaccttctctgagccctcatttttctattataattaccaccatattctgtactactttcagctcttgtgttcatgtattatttttagacttattactgtgaggttatgtctctgaagccctgatgtttcctaggttttctctgatagtgccctgcctttaatttttgtttctagtgtatatttaataaggtctagagcagataaattataaacaacagtcaggatctggatacattcaatttaattcttgatttatatttctatttttgtggcctataactcaatgttcttcatagaagacagtgatccatgtttaagaaaacatcagcacttagtataaactcatgaaacacctatgcatctgtacattaaaataaagtgtgaggtgagaatggggatttctttttctagtttctgtatacttgtattttctagcttttctaaaatggtcatgcagtattttgataataatagctaacactaatagagcacttactatatgccaaaacatttctaagcactttagatgtattagctatcttaagataccagggtaactctatgagttaggtaccttcgtgatcctcacatggaaatagcgaatctacaggtacatcctgctctaagaataaccataatactttcaacatagcaagaaattcaaatgctttaaaaaatattctttgtcttttggataactttctaggcatatctccgttgtgtaatttacggcacttcctgcatttgggccacttagtgatgattttggtggatggtgatggcaaggttagtcattataaggacaagagagaagaaaccaattgaactgtatgatgacgcaagcaacagtcatcaccatgtgcttgtctcttcctgacctctaacaattaattgctttagctccctgagtgtcagaaaggatgagtctaagctgctgcttgcacataaatgatgaacatttgattaaaatatgaaaaaaaattatttaatttgcctaaataagcaacatgtttagagccatttaaaacctcattgggatttttagctcttttttgggaatcagcaaaaatagagttatactattgcttcaaatcatttttgagttaaaaaatttcactagaagttgaaaaaccatcccactagaatgaatttagccctctttcaaagtaataacgcctagggccaggcgtggtggcttacgcctctaatcccatcacttttggaggctgaggcaggtggatcacttgaggtcaggagttcaagatcaacctggccaacatggtgaaactctgtctctactaaatacaaaaattaggcatggtagagcatgccacactgtagtcccagctacttgggaggctgaggcaggagaattacttgaacctgggaggtggagtttgcagtgagccgagatcacgccactgcactccagcccggtcaacagagtgagactccgtctcaagaaaaataaataaaataataaataaagtaaagtaaaacttgccactttaattcattttttcatatctacctttttatcacaaggcatagtttttcttatttatagcccactttcaaactgttactgccaaattaactttgaagtacttgttaagttgttcctagcactagggaaaagcccactgggccattatgggtaaatatacctgtttttaaaaggttcacttcctgatataagccatgacaaacgatttcagctagaaatttttttaaagcatttaattgaataatctacatgtaatcaaagatatccttgcatatttggggaagtgtaccttgatgacaccattacttttctttctcctaccaaaaatacctggctgtatccttttgtaccaccgacagttgtactgcttgtaccaatgggaattaattgtgatttcattctttttctgattcttttgtgctaactccattacagtgttggattttttttctttattcttctctttttaaacttttaagaccagaaatgccatcttcaaatagtaaaagctccacttcataacagtgattgtacagtattcacctcttcatctcagactcacttcatattgtttttaacagttgaaacttaactatggagtctctgaagggctttcacaagtaggatatgtctttttctctcatcattcttcaagtgttagataattgaggaaaatagtattcttaaaggaagagaaatgcatacattatgcagtcacgatgtacagtgatcctgtagtacatcgagctaatgagatttgcatgtagcatccgtcatggtacctgtacttaggaggttctgaggaaatgttagtgcctttcctctcaatagatcatgtataagctattaatataactggaatttagcaaatatggtcttatggcagaaaaaaattcttctgataatccttcaaaatctaaagacagaattatatggaatgtaagcaatattgatcaattgttttaatatctgttgctgggcacagtttgcttttctagtgagtactgaccatttcgtgctatggcaggaagattttctcaggttactcacccacatatgatatgaatttctctagctacataaggactaataatatagttactttttcattttttggcttcttgtagagaaaagtaagtagatatgtttttattccagaggtccattttcttaaatataacaaacatattagagaatttccatttatattaaccttcaaaactgattttggaattcagcagatgcttttataggctgatgagtttctccaggttttggatgtgactgcttcctacgacagttttctagtaacccactggttacccccttttcttatgaggtcagacactgggctgtatactattttgtattatcctttcatctgctaagcacacggtacaatctgtgagctgtgtatcaaatgaataatgtaagatttgaacagttgcttccaggagcctaaagtttcttagtagccttaatcctcagcattctgatttttatccacacacccttctcatagctttcccttccagtgcttccagaaactgacccttctagtgacgtctgctacagttgttttggaaacctaaatgggaaaggtaaacataaattcctgaactcaggatatatctaagacctcacagagtccccttatcctctttctgtctagtgggggaagttggcatatgcagaaaccatccagccttcagtgatacacaatgaaaactagaattccataaaataaccctctagttccactgcagagattgtacatgagcttcagtcagtcatggaatattctgtcatggattgtcttatatttcctcaggaatgtgttaagacagtgtttaacacagtacctagacaacaagtgctgaatagcatggatattgttaagtattttaatgagattatttgatgtaataattgttataattgagtatatttccctatagctttagtgcatatggacatgcagaaagatgttttggcaagaaacctgttttcattcttcttggttgcagtcttcatctaggaaaatacagtagtcctatcaccctgcttatccacagggaatatgttgtaagaccttcagtgattgctgaaaccacagaggaccaaacctgatatggaccatgttttttcctatgtataggtacctatatgataaagtttaatttataaattaggctcagtaagatactaacaatatcttactaatagtaaaatagaacaattatactgtaacaaacatgtaaatgtcgtctttttcaaaatcccttactgtgctgtactcacctgttttcggactgcagttttctgcaggtaactgaaactgtgggaagtgaaaccgcagagaagtggcgactactgaaaaaaaagaactatttctatttcttactcaatatcctgtatttagatgggactcagtacaatggttacactatctttctgtgcctcagagtcccatctataaactggagctaatactatactgtacttactttatagggtagttgtgaagttaatgattaagtatgtgtaaaacagcccttagaacagtggatggctcatagtaagtgctcaaaaagtgttagctgtcatacttatcgttgctgcttattagtatttttatggtttgttatttcaaaagaaattcatttcccataacaatattattttcttaaatatgttaagctttaaaataaaagcatatcaaatggtttacttgtataattacataaattgccattaataggattggtttaatcctcatttgcttagtggttaccaatagaacaaactcataaaaaggaatgttgttttgtcatcctaattgtcattttagcttcttagagtggtgtgtttttgttctttaaatactgtgatacttgagagacttattccaatctcagtgttaaaagtatcactgtattttatttttcacatattctgttagaactatcacagaatatagaatattggttataatgcaaaatgctgctttaattattttccactcattcctttcttatactcggtatttttcttttgacaacaggaactttttttcagctcacctcaccatccccctcactctatcgatcatctagggaaggagcttgcagaaggaatcttaaggaattccttctttctttttttttttcttgagacaggtctccctctgtcgcccaggctggagtgcagcggcctaatctccgctcattgcaacctctgcttcccgggttcaagcgattctcctgcctcagcctcccgagtagctgggactacaggcatgcaccaccccgcctggctgatttttgtatttgtaatagagacagtgttttaccatgttggccaggctggtctcgaactcctgacctcaggtgatccacctgtctcgacctcctatagtgctgggattataggcgcgagccaccgcgccaggccttaaggaactttcatacccctcacaatatcgacatctagggaaggggcttgcagaagcaatctaaagttttgacccaggaaaagaactttatgccttgatttatggtgttgctttatcctgattttttctttcagtatattaaattattttatttttctttgtaataattccagacagcatattttcaagagtccaaagaaggatagacagaagatatgtttagcttgaattgattcagacaaattggttaaaaaatgcacttggttataggctccatacagatcattaatcataaggatttttcaggacagaaaagaggaagcttcctttcagaggacaggaatgtgtgcccagttatagctagtatatgtagcgaccagtacatgtagcgacttgtaaagaggttaggttatccaccgtggagcaggtcccatcatttgtgtatccaaatcaaggaaataggtaatttaaagaatgaaggatgactgagtcagaacctcccagagctgttagctccttggcaaaaatgaatctgtgacttcatgggaacatgctcttggattaccatttaaattgagtaattaccctttgttcggtaattgatctcccaccctaaggaaatggtatcaccttggaatatgtttattttctctatccctcccactcactctttaatggtatacatatttcaagcatagagacgagaatagaaaaaatgtaataatcactaatgcacttactagctttattaaataatattcttccataatgctgtagattatttttttaaaaaaaattacagatgtggatgagtctccttgtatcatcatttccctcccttcttctaaagtgggaatccccatcatgatttagcattttactttcttatgcatgtttttatacttctaatctatacgtttgcatccatcaacataaacattgtacagtattactttgtagatttgaaatgttacgtaaatgttctcacacgtgttgtattattttgcggcttttttgtagctaatttaattatttctactttatgtagttatattcattcatttatcctgttggatgttatttcattacgaatattaatatgttatttattcattctgttgatggtcatttaatttattcagtttttttgtttgtttttttttttaactgttaactgttacagtaaacattcttttacatttcttctatacatgtggaaagttttagggtgtgtacctgaacatggaaatgctgattgattttgaaagtggtggtgattcctcttagaatagtatatgagcatttttctttctccatattcccaccaatgcttggtgttatcagaccttatttttctcaatcagagcaggtgaaatggtattatattatgacatcttaatttgcattgtcctgattacctgtgagtttaaccattttttataactttgctagctattcaggttttcccttttgtaaatttcctgatcatataaatagagcatatttcaaatgatagtctcatttgttaaaggtaggcaaaatagtcttgttgaaacatattttgagtattgataactaatgtgtttattcagagggtgtaattaatatacatttcaatgacaaaaatgaacttaggagaagaaaaccactgtcctggtaaatatgtcctaaactctatcattttggtttttgggtagaaagcatgttcagggaggtgggtgcttcacttattacttatatctggtatttctctgtttatttgaatgatgaggaaggtgctgattttatttgctaaaattatgattaggcagatataatgagctcggagatagtgtttgcagcttgatttttatgagagagggcagaagattggatggaggggtgaggaaatgaatcaccaatacaagcatggcagctggatctaaagaccaatgtacaaatgcaatcaattatgtacctatatgtaaaatggtgagaataggtattatttgcctgggaaattcctcctatactttccaatcctcagtatagtaaaatgctttttctattattggtgaaatcctttgcttcatctctatctccagaactcagtgagctcagggaaatttttaacatctcagtaatatatcctttggcatttgaatatataaatgatttagaaagggactcatttagttgagaaatagcaattttccccaggtattcagttgacttttcctaaatcagattaccttttagtgtgcaaacagtggtcgcactataaatatttgctgtctactgtgattggttgaatgtgtggttaatctgatgatctcttcttacttggatttactggggatggggctaattacatccttcaagaacatatggcctgctgacttgtttacttaatgtcttgtctgcttaatgtgacccacatgtcctgagctcccccactggccctagggcgggaaggaccctagccccttgttggtcacatgggggttccaaagccccttagttgcagcacgttttggtgtctgatatctcctctacttcctttatgtcaccatttaacctccatgttgtgctattctagtatatgaatatcaccatattgtttatcagtgttgcagtctgtagtgaggatgtttgacatatgaattaataaaacccttatagggcctatgtttttaagtcttgacttcctgcaacattgttttaaatgaaatagttcatatgtattttggctacccacgtcattaggctaaaaaatcttatctgtattgtctgccattttcttgctgtcccctttctgtaggacttctgtaactctgctgtctcccttctggaagactttgacaacataatggtaacacccctgctgtcattccttcctttttctttcttttcttttttctttttttttttaataaatttttatagcattgccctttgaacgtcaaaatgagaagcaggtttttctgtagctggtaataattatagtcttcatttcactgttaactcggtttatgtttgagactgtaacacagaatcatgaatgcattgaccatgtttaatttaatggaagtttttttctgaaaatgcacccctttgatcgcctcatgatttccatcatatacatctatggtatagaaaccaatagacattcatggcctgggcttgggaacatagaccagttcgtgcaccttcatctcagtcccagttttgaacctgtctattcctgagctcttgcttctctctgtggtaatttatatcattagtagaggaatgcatggcatgctgattcataggccaatgcaagataatgaaaactgtggttatgaaacttaccctctcatcacatcccactcactggctattcccaaaatctcaacggaacacatcatctctattttctttccagtatggagaagatttttttttgagcataggtcttgtgcatgcatgtcataagacttcatctctactgctttgcctgggctagctaagaatgcatgttttgcattaaattacttataggtttctgtatcaggtagccaacccacaacataaacccaagaagcattagaataaaaaagagcacacatctcagatgtgactgtaagttaacttgtttcactgccattttaatgggtaacattatctatacattgataaagatatccttaactgcatattcaaactttgaaaatatttaggttatttaatacttgttgtataagcattttctccaatagttatttcagcaaaggaaagcttggaaacttttctgaaaagactcagtttttcttgacagtttatggtattcagggggcaggtgaggattttattgaaaaacttgagttaaactatgaagttcaaaaatgttttggagacagcttatgtttgctatagggcattgtttattattcaggtgataatgtaattcagatagaaaacaatttgcatcaatcactggctttttaaaaaatgtttttattgacagctattttatgtataagtatttaaagtcaaaagaaggttccgtgatttctatattaattcaaagtaatgaaaatgtgtatttttgctatccattttaccactcttatttttctataatattctgctttcttaggaagttaatgaatctatactcaatcagttcttataatatatggacatgctaaaatcataaaggttcattactgtatgggatgtgtttgttttagaatgaatcagactattctagcagttagttactgttcattgattcccaaccaagtcgtatttgaggtgaaaacttttaaaagtatcaagcataactagccaacaagacctcttataatttagaatttcctctctctgttgtctgcagttgaaataaaccagtatgatgtaatgaccacaacttctggttcataccatgtggtgttttagcctaaagcactcagtaacttccaaactaggagttataaataaaaccctttctgctaggtgacttgtaaaacattacccactggtttttgttatgtgccttttattacttttttccaaatcagtatttccagaaaccaagtcacaaaatctggctgtggtttttatagatataacttgtctctctacttgtaacccttaaacactactgaaaaattactaaataaggatttgaatcattactagtaaattgagtggataggaaactcctgattctaaaatgctctgattataatccttactgattgctaattggaggtataaccagtcctacatgaaaaggagatcttcacattttctcatttgattgagggtgtagttgctaatacagatcagattaagacacagaagaatgaaaattatgttcgaggatcattaaaaatttaaaacttatcggatgcattcatttcaaattatgccaaaagcctttgagtcaacatctctttgagctcacatacttctgtctaattaaaaaatacagcagtaagagagagaactcttcttataaaggttaggaagataggtcagtattgaacagcacagcttctttagaagttttttaaaaatggaaattttagaaagtacatatttatttaatgttatattttgtttatagaggtaagcccaaagcagagtgcatgaaaatgaagtaaagagaccatgtgtaggaatttacctcaggtagcaatgtagagatgggcttatacaattattagactgtcccagttctctgtagatcattccctttgcacatacaagtcaggtatctgagccatggaagcttgagcagggaacaaatatcttattctctcttactgatatgcttaaaatcacatagcacctgcctagacacaaatatgccaccaaaaaccatcttcctgcaggctggatgcagtggctcatacctataatcccaacactttaggaggccaaggttggaggatctcttgagtccaggaatttgaggccgcagtgaagtatgatcttgccactgcactacagccttggcaacaaagtgagatgctgtctcactttgtgtttcacataaacaaaaacaaacaaatcatgttcccatatagttctctccatgcattaaaaaatatgaagttaaagtggcctcagttgttttggttgagcagaataaatagggagaaattaagttactcttcagatactaatgctggcaggaagaagaaatcattagaatgatagatgctaaacattaaattaaatttgagttttcaaaagatggagctgacaactgtgaagcaattagaaagcacttggtaaagtaattgatgctcaaacataaatcctaatttgcctctggatttcttggttaacagataaactaaattaaatcttagttattctgaacagatatttactgagcacttactatatgtgctaggcactaattaaaaataaagcttaaaaatttttcagaaattaacagataactaaggtgaccagatgtcctgatttgccaggcatggtctcactttgccctcttgccctgtcttgtcctagtttggatgacatgttagatagtctgttcttggtttaatgtggccaaacccatgcctaccaacatttaaaagtttttttactaattctcagtctctagtttcctttattattcccacattgtggttcttatttaacatttgtaaaatatttcaagttattaaagaacttattcattctgttctcaactaattgaactgtttctacaaattgaaataatgtgttcctgacattattcttggaaaaacaaagaaaagtaggaatccatttcattctgataggagagattagggtgttttctttttaggagcacatgatgataacagctatgcctggcaaaattgggaagtgctagtcaaatagggatgtttgtgattttctcagggagaatattgcatatctgaattattttccatacttaagtagtatgttgggacaaactggtggtcaggaggaaacataatatgctcacatataaatagttcacctttagacataaaggtggaaaatgttagggtgtgtacctgaacatggtataaaactatatacaaaaactatatttccatttgtatttctttttccttttaaaagtatggcacaattttctgaatgttttgtgatttttaaaaatgtagaataatagttttcagtttccatttcttcttcttcttttttttttttttttgagatagggtctcattctggtgcccaggctggagtgcagtggcacgatcttggctcactgcaacctctgcctcccaggccaaggaatcctctcacctcaaccttccaagtagctgagactacaggcacgtgtcagcacatccagctaattttttgtattttttgtagagatcagatttcaccatgttgcccaggctggtctcgaactgctgggctcaggtgattcacccgcctcggcctcccaaaatgctgagattagaggcgtgagccaccgcacctgcccagttcctatttcttaaattcccatgatctcaattaatatatgtaaataagaatattgcccaatagctcagatatataccttattagtattctagctccccccaccatgtaagtcataatgtgtttcataaagttcttcaataaaagcaaaagaagagcgaagagttagaaaacatctgctttatgcatctgaatgcagctgtcacatgcagatcgcattctgcttcccacaaagccaaaagagggcacgagtgttataaactacctatagatccctagattctaactcatatataaatagttgatttttctgttttgtaaaaatggtaatatacatatatttgtctctacaaagaagcacaacagtatgtctcagggaccttgtatgatgctagtgtccaggagtggtctttaaggatctggttgatttaattattccttggcatagtgtttggaggatcaagagccatttggattctttgggaagaacagttttaggctcctgatggtcatactgtcatggtatgtgttctcacagaggaagtttgggctatatttctctaacccaagcaaatggagatacaattgtttttttaacagattaatgagttagagactaagagtatcttcatgatagcctactctgaaagtaagattcttgtatgtataaataccctcagaggtacactcaaaaatttatgtttcattcatgtgtagatagatagtcacctagagagatgctgaagtttcgtaaatggccacgtgattttttttgtggggatcagagaaagggcttaactgtcttaggtatgcatttggttttggtatctcattaataaggcttaatagagattgtccttttggtttttcattaggatgattttaagaggctatatgtccttaaataataagcaccaaataagtattttcatccttaatgtcacacatggaggcatctcatgataatggaaagagccctaggctttcaagtcagacttcctggagtttagatcatggcactgccaggtcttgctgggcaagtttgctaagttgcttaagctctttgagcctggcttttcctgtctgaagaagatgagaatgatgctcctttcctatagggttcttgtgagaaaatgagagtaagaaccagaagcccagcctctgaaatatgatcgattcttaataatcgttgatatccttcctcttaagctacatatttatccctttctccctgctagaaatacctacactacttttcaaacacattaaaatagctttatgtaactataatttagcactttttaaaatgagaatctctgttaaagacagtagtaaaataatcctacaataaatctcattctttacaatcagtaagtcctgaaaaaaaaacagagtggtaggaaactaggattatttttatgattattactgcaagcttccatgaagtaacttctgccaccaaaacataaaacacacataccattgctcttgtgaatatatttgttttcttatggccaaaacatgtattagattaagattggtgaacagatgttaattggttttattttgcattgtagttggttggaattatgtttgccattaacttacaaaatttatcgactatattctcattgatttttagagtcatagaaagtactaaatgtattccttgaatatctggctaaataggcaattagtaggtcactgtgaagaagcttcattaaaaagtcataaaaattttatatgccaccgtgtgtctgtaccacacgttctcttccctttataggcactgggtagtgcagccctgtggttccagatttcacacttagtgggacatttataccctggcatgtattggaagccagctgacagcctctctgctgagcagaccattgataacttaggcttgtatttatggctttgttatcattgggaaaatctgtagtcttctttggaaggaataagttcaacagtctaaacacataggatattgatgagaaataatatttaatacattttgaaaatctttgagttctttatccatgtaatgagattagatgtgggttatttggattattaaccagaagctcaaatcaagcccttgctgttatgatcaagagtttgctttggctttgttttccagggccagccgggggaccaggctgctctctttgctgcgcaagcacggccctcccctcagctccctcagtatccagggctgcagcaagcacaggtacccacatttgctttgtaggtactgacaggattttcaaagctctttattggaggtgggaaattaagtaaatagaatatatcaactccctatagggtctagaacttgattacttcttctacttatagattataattgatatttcaaaaaagcatgatcaggattgttgaagtcttaggattgattaaggagcataaaacattctagaaaaccctttaaaagtgtaaattcaaaccttttattagtgatgattatagatattgaaatacttaacaatcccagagttacttcttttatgttataatgtataatgatgtaattcagttttgaagtcatcatatttgggctggactcagtggctcatgcctgtaatctgcactttgagaggccaaggtgagaggattgcttcacccccagaatttgagaccagcctgggtaacatagtgagactcagtctctacaaaagaaaataaaaattaaaaaattagccaggcgtggtggcatgcacctatagtcccagttgcacgggaggctaaagtggaggatcgcttgagcttgagaggttgaggttgcagtgagctgtgatctgttgccttgggcaacagagcaagaccctgtctcaaaataaataaataaatagaaattgtcatattcaaagatagcatcaatgaggaatcatggtagaataagaaaataacggggcttgaaatcagactttggcacagttcctagcaacttactagctgtgtgacattgtgtgagttacttactctgagcttcggtttccttctctgtaaaatagagatgaagtgtatgaggacaacctatggaacaaccagtggaactaacctatggaactaacatagtgcctgatacacaatataatgcaaatcttgagctacttttactaataattttgctatttctgtattcgtatactctcaccccatccctctgggaatcaggaatgcaggggtgttggcaagattgctagttggattgacaattcaatctatgtccacagctgaaagaaaagcccacattggcctacacaggcactgcgtccttcagcctggatccattcatgctgcctgctagaagttcattatccatttctctgtcttccaagtcagaggcattaaactacctgaaaatgtgctttgaggatttgaagagcaatgttgttctaccttaattagcattgtgttctataaattgtacctagtgatccaacagaacttcaggtttctcttttccataaggtgacaatacacaaagaactaggtacttgtatattaatattcattaggtaaattaagtgttcacattattagtagagtgccaaactaggtccagcccgtactagaggataatgaacagttaccaattgcaccattcctggctaaggtattaatagttttttgttattgttttggaactggttagttactacacacacatttatcagacctgaagaggtgtagtcacatactggaaaagtgtatttcattattttaatttacatttgagcatgggtagcttttctaattttggaaatgatattaataatacttcatctgttgaactttggtgtcatctgtgcactgaagatttagatgcttgcctgattgtttctatatagaaacatgcccttctctaaaaataagcagctaatcttaaaagccagtttaactaaatgaggattcattttttttaagttgacatttctggtgagtcattacacagccagatcattctgtggcttttctgaccatattccctgcatccagggtagtcctcctcaaattttgagttatgagaacctttgaaaacagtgaatttcaggggagtcctcatgggtttgtttttgccccatatatcgtagtgatgggaaagctaggtgataagttgaaacattgacttcttcccttgtgcctacctgcagaccatgccacagggctatacaatgtatgggacacagatgcctttgcagcagacatcgcagcagcaggctggcagtgtggtcctgtctcccagctataactccagagcctatccggccgcacattccaaccccgtgctaatggaaagactcagacagattcagcagcagccgagtggctatgttcagcagcaggcctcgccgtacctgcagcccctgactggctctcagaggtgatacatgtggaaatgatgatggcaataatgaacagtcacattctcgggtttcttatgcttcttatagggcatggtactttatcattgtttttatgagcttgcatatttgcagataatttgcattctgtcatctcgtttttagtagtatccagatagaggttcaacataaagaatgctccatcttgtttatttcattaaagatccttacagttttgactcatgtcttccaagacatgagtgtaacagtctttacgtgatagtgtgtttgcttcagtgttcttttttttcctcttcttttttaaaaattctctgaacatatctaacagagaaaactcttgattattgttaggaatgccttactacaatttgttgattggagcaataaaatgtgtgattgcaatactaattgtgcatggtgcacatgagagttttgttataacttagtttctaccttttccacctcaaagatatttggcaaaacaggattatgatagacttttttctgttcttgtttaattagatcccttagagtgtataactgtactgtctgttgtagtagctgccagccacctgtggctgtttaaatttagactatttaaaattaaattaataatatagttcctcagtcacactagtcacatttcaagtgttcagtggtagccaaatgtggccagcaggactagcttcaatggtgtgtgacgtgcactgtgtttagaagggcctgtgtttaaaaaggcttcatgcttagtttaatgctctgcagtttctctgtggaaattcttactaagttttgatcagggagccttgtgttttcgttattcactgagaccccaaaattatgcagttcgttcttgtggctagtagttatcttattggacagcgcagagagaaaacattgcagccatcatagaaagttctgttggatagtactgtcttagcagcatcatgtaaaacgtgtccatctagtggatagcagcacagctcccatctgttaccatcaatggctgcatgacgactccaagtaatcgctctttggaaagttagcaaggttgatggtaacacatttgagaaaatagatattttggataataatttggaaaatgtgcattgtatgtacaatttttataataaatagcagcatagcatggcccacaaacttgaatttcaaagcccaaaagttctgggttcaaatcccacctgtgccatttgctttcttaataagttacctctagctctgttttttcatttttaaagtagggataacgaaactgctgaccttaaagggctctctggtggggagtaaatgaagtaacacatttcagacctttagtacagtgcctgcttcaaagtaaatgctcaattaatattcctcgttgttaaaaactattaaatgtttaaaaagtgatttattgcatgactgcaattttaccttaagtcatgtgcttgctgtactttttcaagtggtcacatctattattttaaccactgggctttagtctatttgaattgtgcaaaggattattgagcactgattgtttcttggttggtgtatgtcatgtgctggtagcactgattaaaagtttgacattatgcttgggcctgaaccaagttgcattattctttgccagactgaaccatcaggctctacagcagagccctctggtgggcgggggaattgatgctgtgctgacttctgcacatccaaaccttccctccgtgcccctgcctcaggatcccatgagacccagacagccgcaagttcgacagcagcagagactcctccaggtacggggcagggagatgagggcaatgccatcacccttcagacagtgcaaatatgcaacagtcataaaaaatgaaaaacactatagttgtcaattgccagattccaaggatccctgtggatttgatgctaggagctacattggtacaatttagttacaacttggcaagaattttattttctctgtgtatctaccaggttatgggcagaagagtacgttttgcagaacattcttcccatttcacaaaggtttgggagggcagacggatgcctttaatagagttggcctcagcttacccagtctctgtttaactaggagccatgcaaattttttaaaagtgtcataaatgtgaaaacaaaaaactgagccatccagagctttcatcagattcctagagcattctgcaatctaaaaacatttctataacacctctggtctgataaggctgtgaaatgggaggaacatagactgtttcaaaggatatttcatcttgtctttgttagaatccagagaactgtcattcacttatttgatgtacattttaagtcagttagataaagggttcttccccttgatacatttttttttttttttccccttaagacggagtctccctctgtcacccaggctggacaacctccacctcccgggttcaagtgattctcctgcctcagcctcctgagtagcagggattacaggcgcccaccaccacccctggctaatttttttgtatttttagtagagacgggtttttgccatgttggccaggctggtctcaaactcctgacctcaagtgatccgcccacctcggcctcccaaagtgctgggattacaggtgtgagccaccacacgcagcttccttgatatgttcttgtttctgacttgcttatttaaaaaatataggccattatgtttacctgtgtcatttgtcttcaatattaacaagcttgtcctatgttattggactggagatttcctaaggagactgtacagtgggctctaatcttatcagcagtccaacttgagatacacacttactttatatactaccaagaacagaacaccaaaaatgaggaatctagtagagctggagtgcccaagggctgtactctcaactcggtatgaggtcagtgagaagtaaacctgccatgcagaaagggacacaaaggagcttggatgtcttatccttgacactggatagaggggagaaacaaatatctcccctgagcatttgaaccacaagctccggtgggtttgagtctgaattcagtgtgatccacaaaattctggttggtagtgcccaggtgacaggcaaaagccaacacaccctctggaactgggcttcccaattataagatgccattagtagtaagatgtcattagttccatcccaatttgtgacctgttaaaaatgttaaaaaaaaaaaaagttgtatcacaaaattgataacatgtggtaaccgattaggagagtatggccttcagatagcaatctcagtcattgtatagatgttgtttccaatggtaaaagctctctaatcctgttttgtcatggaaatacttatagtacctatctcttaaatatgtagaaaggattaaataagaatattcaagtaaaccactcatttgataattttacgattaatgttatgactattatcattactatgagtactcactttcttaaatcattttttccaagttctgaggctatgtttcagaattttttaggattgataatttatattttgctctagtttagaatttctcatttccaaatcactgaggaaagttaccacattatttgtttacttaccagttttaaatcttatgttggtgtttttcaaggctgcaaatacggaaagccttttcttattagaccatatgtactttttatcctaattagcataatatgtccttctggtaattttttcatcatcaacacattcttccctggagataagtgatttgcttctacaacaggattatacttcttttttggtgactggccacctctgtaaaggaaaaagttaataatgatgaagttgggttaatttttcttagaagaggttctagagggctaactggagaatcatattgcagtcattgtgatttgggtccaacttgcgttgttcttgttgggatcatgctacccagacctctgctaggattccagatccatgagcattgtcacttagtgagacatgccatatggcaatagctatttattagttggctgtaaagcagaccagtaattgaggggatagtatgcaaaccaagttggaaaagtacaaaagatgaagaaatgtctagactgtcatcattatcaggatgaagtgtttgggtggaggaaattttaaaggtcattgaaacaaaacaaaacaactattaatatttttctctcctctgtgtcccaccttgtggatgtctggtctgtgctttttctgtgacttggaagcattttccaagagctgtgtgtttgagccaaccctgttactgacatgatttctgaatttctgatgtaaattatgccagaaggtgtcatggcgactagtctgcctcttccttttggaaaaaaacaaaaaacaaaaaaaaacctttaagaattctgccagatatcataaagaatgagaggattactactgagcagtccctgtccaacctgtagtgtaagaagggataaaacatgcggaaggacaaaggacatgaaaggaattaaaacagtaagcagaagggatggccccggacagcgcagtgtggaatagacagcagtactgactgccagtggaagagatccgtagggttggggtggtcctagaaggcttcatggatgagcaggtttaggtcttgccctcaaaaggacgaatgaggttcagcaaggtagagatgcagcaggcaggtatatattgtttttactacaacataaaaattagataaaaggtatatgggggaaacagattcagcaatgctgttttcttcttccttttaagtgtataacatttttaccctctttccagatgcagcagccccagcagccccagccccagcagcctccccagccccagcagtcctcgcagtcccagagtcagacccttggtctccaagcaatgcagccccagcagcccttggtaaggcctgttgttttggaatcagacatgtgggtttcttctttaaaagcaggttgcattgttcatgttcataagattgttaagaatcgacaaagcctaagtataccctaaaaatttttcctagaactttactagagttttattgtcattgtagttggtatatttattttcataggaagatacaagtaaatatttgggattcagtaggttataccattattcttcaaaatttttcggactgttccacagacaaaattttttacattgagacgtggtctttttttcctaaacaatgataaaacgatgatttactatgtatgtttaaaagattgtcttaccatactttgatttttactataatctcaaaaaccatgggcgcactttctaaaatattatctattatcttcaataagaaattgtttttcattcagttagcacttgctgcaagagttttcatgtaactcacagtcggatagttcacttctctagcttcataaatcaaatttggaaatgtcatatgcatagccatcaaagttttctaaacctcagtcatttacaacagccatattcctgtttcattaattacttttttttaaactgtcatcttattatatttgcttaaataaatgtagttttcaaagaagcattttatcattaccatccataattatatcacttgccacatattggaaatatctgtgaaagtaaatacaaaaataatttagaagggaatctccatttaactgagtgatgtgaattgcatgaatgagccctacctacgatgagctggctgaccgctcatgtctcacactttgagaaacactagtgtagactgccttcagcacaggatttttaaactagctggtttcacaacttgtagaaaagggggaacaacgtggtatagagatagtacatatggagggatcagagtagagttaggtggttaaagaactgcgtccaaatcagattgaccagaacatggtcaactggaatagggcatccatagtacatttaacaaactctgcgtaagccagtttgttccgctcccccagctccccccccgcctttttttttttttttttttgagacggaatctcactcgatcactcaagctggagtgcagtgcgatctcagctcactgcaacctcctcctcccaggttcaagcaattctcctgcctcagcctcccaagtagctgggattacaggcacctgccaccacacccagctaaattttgtatttcaccatgttggccagactgtggtcttgacctcatgacctcaggtgatccacccactttggcctcccaaaatgctgggattacaggcgtgagccactgtgcccggcctattccccatttttaagttaattctttttaattatggatctagtttttccagctctgatttaaaaatatatatatgtttgtgacatttactgcaatctacttcagaaaaccttcttaaagtagaggtagtatgtaaaactgcactgcctgcctacctatccaatgtgtattagcaggaactggctgttacttagcaaatgttgtagaagagattcctttggatgcaccactgttagctgagtctagtgtcccgtacaagaacgagatacaccttttgttttgaaataatttcaaatgacagaaaatttgcaagaatagtacaaagaatttccataagccctttacccagatttactaattcttaacattttgtcacatttgctttattattctctctttcactccccccacctactgccatttaaacatacatgtgcctctttacccttaagtactttcacttttttttttccaaaacaaagatattcttttataaaaactgggtattattaaaattaggaaattgaacattactacaatgctttataacctataactcttttgcagatagacaaattaatgctctttattgcattgattttctttttcccctggttcaggatcatcacattttgcatttggctttcatgtctttttactcgccttcatctagaccaattccaaagctgcctttttgtcttcatgaagttgacatttttaaggtctatggaatgtttattttgtagaatgctactcaatttgatttatctgcctagattaatcatgattagattcagattatacatttttggcaacattagaggtgccattgtgtccttttcagtgtatggcattaggatatacattgttggtgatattactttaatccttttgtgtgtcttgtgtctgatagatctccccactgtgaacttattattttccctttgcaattaataatttatgagaatagtttgataaatctgtcattactcatcaaatcttcacacactactgttagcatctattaaattattcttgcctaaattcattcttactatggatgtggaaaaattatttttttttaatttttaattcttttaattatggatacataatatttgtacatatttatgtacagatacgtgagatttcgatacaagctttcaatgtgtaatgatcaaataagggtaattggggtacccaaaatcgcttcaagcatttctaatttctttgtgttatttcgtgttgtttgtgtttctttgtattccacttctactcttttagtgattttgagacatatagtaaattattgtaaaccactgttgccctattgtactaccaaacactagttcttactttgtaatgggtacaaaatggtgatttttcttactcttatgtttctgcatttagcagttggtatttgtattagttagggttctctagagggacagaactaatggaatagatatgtatatataaaggggagtttattaagtattaactcacatgaccacaaggtcccacaataggctgtctgctggctgaggagcaaggagagccagtccaagttccaaaactgaagaacttgggagtccagtgtttgagggcaggaagcatccaacacgggagaaagatgtaggctgggaggctaggccagtctctcctgttcatgtttttctgcctgctttatattcgctggcagctgattagatggtgcccaccagattaagggtgcgtctgccttccccatcgcactgactcaaatgttaatctcctttggcaacaccctcacagacacaccgaggatcaatactttgcatctttcaatctaatcaagttgacactcagtattaaccatcacaagtccaccccttgtctacttgagcccatacacacctcctgagatcagacataatcttcaaataaagacaatagtaaggtcgtaattacagctaacataatacaactatccttcctgcaaccggaaacgcaccaatccccaacccaaatactattacataaagttaacaatgcttaaatcctgatatgaagtcagtaaatcctatgtcacatgataaaggaaaaggaaataaaattaagatattagtacaagtgtatacctgcacaaacatgtttttaacaaaagaaggaggaagtactcatgacagttacagtccgcttttctgccactgtcacgtggtcatagccggtattgatgactaccttcttctgctacccattctgtattcccttcaccttcagcaagcacctcagcaggtcgtgtttttcttcctggttgagtgacccaaagcattcctgaggggtctggatcatttgtagtcctgtctggtttgggctgttgtagtttcccattgaccttaatcacagggcatagtaacactaagagacgccctaatggatctcgtgtattccatgaatactcttccttacctctattgtggaatagtagactgatttcatcttgatagtccgggtcagtcaccccagccaacactgtaactcccttcttagcctgttggcttaaaggtaggaggagcccaaagtgtccaggtggcaatcttaatttccagtttaatagaatcattgtattcctagtggcagtgttcctccctctggaactaagacctctaggccagcagaacgtaatgttgtgggaacaggaagcaaaaattttgctagtggatcactaggagtgatggtgagtggtgccacttccacttctaccccttgattcctggacttgtgaatcctggctatgggagaaacagtactatatattggatactgattaagagcatacacggccttctggagaactttgccccagccctgcaaagtattgtcacctaattggcattgtaattgtaacttcaaaaggccatttcaccattctgtcaatccagctgcttcaggatgatggggaacatggtaagaccagtgaattccatgagcatgagcccaccgctgcacttctttagctgtaaagtcagtgccttggtcagaggcagtgctgtgtgggataccatgatggtggataaggcattctgtgagtccacggatggtagtcttggcagaggcgttgtgttcaggataggcaaacccacatccggagtaagtgtcttccagtgaggacaaacctctgccatttccatggtggaagaagtccaatataatcaacctgccaccatgtagctggctgatcaccctgaggaatggtggcatatcgtgggctcagtgttggtctctgctgttggcaaattgggcactcagtggtggccgtagccaggtcatcctttatgagtggaagtccacgttgctgagcctgtgcgtaacctccatccctgccaccatggccactttgttcatgggcccattgaggaatgacagtggtggctggggaaagaggctgagtggtgtccacagaatgggtgatcctatccacttgattattaaaatcttcctctgctgaggtcacccattggcgagcactcacatggaatacaaatatcttcacagttttcaaccactcagagaggtccagccacatacctcttccccaaatttctttgtcactagttttccaatcatgcttcttcctgtgctttactgtgttttttttttgttttgtttctttgtgtttggagacagtgttgctctctcacccaggctggagtgcagtggcgcaatcttggctcactgcaacctgcacctcccgagttccagcagttcttgtgcctcagcctcccaagaagctgagattacaggcacgcaccatcacactaggctaatttttgtatttttagtagagatggggtttcaccatgttggccaggtgtctcgaactcctgacctcaagtgatccacctgcctggacctcccaaagtgctgggattataggcatgagccaccatgcctggcaagaaaatttttatatatccttttatctttcggtatttttctttttcttaatagttccactaagatgcattgtatgtattataaatatatttatttatattttataaacatctccagcagattcagttcttggtactagccaaagctcttcattctttgtttttttctttgctagagaagagggtggtaaggtagctgttgaagataagtgaactcttcctgttttggggttctgattcatgctgtatcaaagtggtaatggtaacacattgccccccatcccctgacttgtcctgctgctatctggtgacattcacagttgaattcaataaatgcttttttcttagggtagtgcagaagtgattgcagtcgtgtgtgtggtggagaccagcaccctgccagatgttatagagcgtgccagtgaaacatcacttcctgccactagaggacttagaatcataggaagtggctcaatggcagcactgcctgtggaaagtagtttacggttgctgaatttttgacagaagagctggaggcattgtattagtttgctagaactccctaacaaagtacgcaaactagatgtcttcaacaacagaaatgtactgtctgttttggaggccagaaatccaagattaaggtgtcagcagggttgttggttccctctgagggctgtgagagagaatctgttccatgcctctcctccagcttctggtggctcgctgggactctttggcatcgctcggcccgtggaagcagcaccctgagctttgcctccaccttcgcaggcattctccctgtgcatatacgtgtctacttttttataaggataccagtccttatgcattttcactttttataaggacaccagtcatattggtttaggtcccatcctaattatctaatttcaacttgattaccactgtaaagaccctgtttctaaataaggtcacattctgaggtactgggtgttacgactccagcatgtcttttttagggaacataattcaaccgaaataataacaggtcagaaggtgagagaagtttgggaagccttgacagaggaggctgaatgtggcagatgttgaaggcagtaggatttgattcattgctttttttttttttttttgaaaagaagaaattgaatgttaattttttttagagttagaattcaagttttatttagaattaatgaaaatatatttttttgttcttttgttgctgttgtaagaggaacagaactaggttttttttttttagcttttgcacaagtcccttctattttaatgcattctaggagatcataaaaatatatatatatatatattttgaaacggagtcttgctctgtcacccaggctggagtccaatggtatgatctcagctcactgcaacctccacctccctggttcaagcgattctcctgcctcagcatcccgagtagctgggattacaggtgcctgccaccatgcccagctattttttttttttatactttaagttctggggtacatgtgcagaatggattcattgctttttgactattttgttcatctctttgctcgttgacgtcatcagctgggatgtgtgggacaatgatcatcccttggttttggctgtaaaaaatcactttaaaaacttataaaaagttaacaacttgtaaaaagtgactcagggcagaaattagtgcttctttaaaacgtgtcaccagaaaacagagtttttctgtgaaaagagcaagaaagactaagaaaagcctatgtttacaaattaaatctggtctggacttaatatcaatgcctgtgttgccatctacttacttaagttgcttgtattctgtgaaggaaaaacatctggaaataaagacatgggtacccttgctgggaaaatatatttggcatgtctgattttggcctaaattatagttcttgactagaaaaatatttttaatgcttattaaatcattaaataattttaatgcttcttgttgtgattaagttaattcttaactaaatatgttgacagaccatgatctattctttaaaactacttccagtgttaagaaaataacgttaacaccatcccgctgcatcatttcctttcatcttaaactcaggttgtcttagtttggtgacttaaaaaaatatgctaacagaaagctttaaatagttggctttttacatcgactgatccttgtgtccgtttcatattatattgaatatttgccttttaaaaatatgcataatggtagcagtagttacttaattacattaaattttagtcagtgatcacttgtgaaattgtccttgactcttcctcaagaaattcatttgttccattcagagaaattgagatattttttcagtctgcctctggaattgggaagtagcaggcacagataatatgattctccttttgaagtggaagaaattaggtccagagaacattgagctacgttgccttcctttgcatgaatttggaaaatttttttttcttttggaaggaaaagaagaagtaatatttatagaaagaggttggggaagaaatatcaggagatttctggtaactggatagccaatatatttgatatagtacttttttcttactaaactgtgtacagattagatgactctgccggatgcaatggctcacgcctgtaatcccagcactttgggaggctgaggcgggtggatcacgaggtcaggagattgagaccatcctggctaacacggtgaaacctgtctgtattaaaaatacaaaaaattagctgggtgtggtggtgggcgctggtagtcccagctacccgggaggctgaggcaggagaatggcgtgaacccccgggaggcggagcttgcagtgagccgagattgcgccactgcactgtagcctggacgactgagcaaaactctgtctcaaaaaaaaacaaaacaaaacaaaacaaaaaaactctatgcaagttactagttaccttgaaaataaacacacaaaaaattctgaaacacatcagctgctagctctgtctgagagtgtggactgagagtgtgccgccctgtgagagtggagatgtggctgagtgcatgcacaaccctatacgttgttgttccttccgctgccgcttgtagggacggacgaccatgcttcattcgtcggagcaatctgtggactctgtcagttggtagtgcagttttaaaataaatgttgctttgctgctttgttcttttggtaacaaatgaagtggtcacagcaaaaacctcttaactgtcatgagggaagggatgtattttactctggtgcccttggaacccagaagattgcctggattttgataaatatttgttgaatgactcatttgttggatgtcaaagcaatgaaaaaaacctttgttaaaatcacacattatccataagaaagggaaaacacaattcaggaggcaaggtgtccagaccatctgagcatcggtaggtccattactgaatcagtcctgcagctgattttgtcagcatatgctttcgctgacggggcaagctcaagttttgagacaaaaaatatttaaatgatgtttatttaaatagaaattactaattagcagcacatttttgcctatgctgtgattgagcagaagaagtaaatgttattgaataaaataggaatttagagatcagtcaaaatacatcaaaatacattatcagaattttaattttaatttattttagagacagaggctcaatcttgtcagccaggctggggtgcagcaatgtgatcatggctcactgcagtctcagactcttaggctcaagtgatctttccacctcagccttccaagtagctgggaactacagtaaatacatttttgtttttgtttgtgtgtgtgtgtgtgtgtgtctgtgtttaattcagcaaacaatggtatttcctggagaagtggttataccatgttgattagttatacctgacattagtaagctgggtattcggtcttgtggttacagcaggagcatggcatggcttctgcctctgagaagtaaaaatccagaatcctagagagagaagcaattatcatgttaaaccatatgtttgctaatagaggcatttacacagtactaaggatacaaaagcagtgattcactctttaaatgcgtgagggaatggatgataacttcagctgatctttgaaggatgagtagatttatgggaagggtagagtggaacgaagtggggaggaagtgtattccaggagaagggatgaacatctgcaaaggcacagaggggagagatcatcttctgtatggatatgggccaaaaaatctttcccacttcatttatcacatttgaatagggaaggcaaaacatacatagattatgatttgggggacctctagtaaaccttactgaacctatttattgacctgttttggtaaattaaaaattcaactcccaccacagtgatgattccaaaatctcaccaggcacctgaatgaaccacttgggggagccattttaaaaattcagatttctagcacattagctacagaaattctaattcaggaagtctagagaggagtcccgggaggataatcctttaaatttcccccagtgattttgtgctgcctcagccacatacagggttcagttcttcacaggaggggttcagtttgaattgaaatgctcagtagtgaggcttctgtagggtgttggaggcagccctcatcccctagtggtaggtgctccagagcccagagaaattgcatctggggcctattgcctgtgcatgtacaggtgaaagcaagttaaaattagtagccagaggccttgagaggaagcagatgtggtaaaacactgtaagaagattgtagatatagatcatgtacttctggtcagtttaaggaagttggtcaaatttcttggcctcagaatcttttcatgttcacagattattgcagacccaaagagcttttgtgtatcaatatttaccatgttagaaatcaaatatttgttaatactaaatattgttatgtttagtacctaaagataaacttatgttcctggaagtaacatgcttttatgaaaaataggcatatatttcaaaataaagttatatgagaatgacatggttttacttttttttttttttgagacagggtcttactttgttaccctgactggaatgcagtggtacgatcacggctcactgcagccttgacctcatgggctcaagtgatcctcccacatcagcctcctaaatagctgaactacaggcatgcaccaccatgcctggctaattttagtaattttttgtagagatggcgatttgccatgttgcccaggctggtcttgaactcccaggctcaagctgtctgctcgccttggcctctcaggagtgctgggattacaggtgtgactcactgtgcctggcctggtttacatttttgaaaatttcttcagtgtctggtttaatagagaacatttgatttgttgtaatagcacatgttatgtaggctctggaaagctgtaatgtacgtgcatgagaaaataagtgaaaaaagcagataatgtcttagtatttattttgaaaatggttttgaccttgcagataacctgacagagtcttggggacctctcccaggaatccctggatcacaatttgaggccctctgactatgtactacctcttaagccaccctcacaccaccctgaactccccaacacacacacgcatacatgtgtacacaagcttcctagggtatacctagttactgcttaggctctgcaaaatatagtatctgaggcaaccactacagtgttttattctgtgaaatactctatttgaagcaggctttaaatgaacataaagaaggcagctatgtgtttgttgagtgaataaatgttgactatttgtacaccatgtaccccaatatgctgttcaatcagcttagacatctttatagccagccttttagaatctgtaattatttctgaataagttgatatttggaagctggtattttcaatcatggataggcttgaggggaatgtagtggttggtcaaagggtccaaagtttcatttagacaggaggaataagttttgttgatctattgcatagcaaggtaactatagttaataatgtatattccagaattgctaaagtagattttaaatgtgttcaccacagtgaaataagtctgcaagatgatagatgtcatagatatgggacattttctgggggcagcagtcttaaccagtcagaagtgaacagcaaaatttgacatgaactcattggtggcaaaagctgacctgaatagacatgaggctcttttcatttatcctacctgatataattattcatgtgcttgctacagaaatgtaatatgcttgattatggagtgctgtcctacattttgcctggtctgcatattaggagtgtttcttagtaaactgcatatgttcagattccaaagcacatatctgtcttaggactttggataagagattgaggacagttacagctaagtcaggattaaatatgctaatagacacatagaatgtctggaacagtacctggcacatagtacaatagtttccccaagtaagcataaaaactattgaatagaaaagaatactaacatttccatataaatgaaagattgatttttatttttcactcttgatttgggcaatggaaaaaaatggcaagctgctgcttctctaatttgtattggggaaaatagtaacattggtggagggaatagttcattagttttgtggatctttcttgttattaggaaagttgtgggaattgaaggctcttagaattagtcattccatcagttgctactgagcacctgctgtgtgcctggcagtaccggatattacagatacatcagtaggtatgccaagcccttgtctttcagtcactcactgtctagtgggagagagaaagttgaaccagctgtcatgccaaatattcagttttgaaagtatcagcttggtaatgccctctaaatagaggataagacaggattgccacataaaatacacggctcccagttaaatttgagtttcaggtaaacaatgaataacactttagtgtatatcccaaatactgcatgggatatacttgtactaaatgcagtatttgtcatgtgcaatatttgggacatgcttggaactaaaacattattgtttatttgaaaatcacatttaactggacgtgctgcgtttttatttgctaaatctagcaactgtacttacaatcctgggctattcttgacaagctctgaggaggaaatagatgttgcactggcgttgggtaattgaagagtctttttcaaaagacaaattacaaaggtatggaaaaccagctggaggtgatggcccactcactgactgcccctaatcccagcgggacaagaaggggagagaggtagggaggctacctgacaggagctgcaaccttcccggtgtggggcgtggccagccagcagagactcatggaggaaaattggcaaaaacaaaacttcactctgctccctcccagcctcactgtgctcctatgctccagtctcctgggagcacctcctccccacctagaagtcggagggcagaggagccagccttgttgatgccctccacacaggcagcctggtgagcacacggagagtgggcacatgggaaacagccagcaccgtgctggtgtatgtgcctgtgtcagaacgcctcgtttatgacagtgacagaccaggaggagagaagagggttggaggaggagagaaggggaagaaagaaaaggagaaaacgatagtctgaaatttgaagatcaagataaaaaagtaaattggcactaccagtgattctaaccaaaagtaattttgcttctggtagatgctgctttttttcctctttggaataaccacaatttcttgcatcaacttaatagatagaatcagggcatgtggtcccctatattgtgcctctcatctgattcttcctacagagcctgtatttgcatggccctgggaattagcactttcttaaagttagtgcctcactcactcatcctgcccaggcccgggctctgagggtgggattagcgaaccttcatcctccatcatatggggagggtatagtcccaaatgagccctagtcctagggcaccaccctgcctcaccagattattttctcccatttgtgcaaggcacaacctgtagtccttgaacaaatcttccaaccagagagcttttattttgccagtattaatatcatgatactcatgagctagctggtgaagggtgagatgaccaggatctttgagctgctgagctacgtctgtagtgtggagttcttcattggggctcttcaaataaatgccaactaataacctggagcttgggttcctgaatagatggggtacttcagatgttcaccagatgcacaacaaggtgtagatgaaaattaatccacacacagttgtcatagcccttttttcgtgaagtgttgagaagtaccttacagactggccctgcgagttagtctctgttcttgtctgtgattggcaccatggaatgatttctgtcctttctcctgtcgccattacagtttcccaggcaaggcttgcagcagacccagcagcagcagcagacggccgccttggtgcggcagctccagaagcagctttccagtaagtacccctgtgtgtcatggaacagacagctcccggaaaattaaaaataagccagcgaaacgtaaagtggcggctctcccaagatggtaccatcttcctcagtacaatgttcatgttatttggtttagcccaaggtattttcattctgtcttcgtttggttttggcttgaatgcttcctttcctgggaaagccccaatttttctcaaattcagtgaagatactttctttttgcttccaccagaatctagaaatatttcttctcattggggggactcctatggaatcaaaggtgtcctttgtttaaagctggagagttcagggagcatcagctaatgcccttaattatacagatgaataaagttagctggcctcccgaagatcttttttttttttttttttttttttttttcttttttaattattattattattatactttaagttttagggtacatgtgcacattgtgcaggttagttacatatgtatacatgtgccatgctggtgcgctgcacccactaacgtgtcatctagcattaggtatatctcccaatgctatccctccccactcccccgaccccaccacagtccccagagtgtgatattccccttcctgtgtccatgtgatctcattgttcaattcccacctatgagtgagaatatgcggtgtttggttttttgttcttgcgatagtttactgagaatgatggtttccaatttcatccatgtccctacaaaggacatgaactcatcattttttatggctgcatagtattccatggtgtatatgtgccacattttcttaatccagtctatcattgttggacatttgggttggttccaagtctttgctatagtgaataatgccgcaataaacatacgtgtgcatgtgtctttatagcagcatgatttatagtcatttgggtatatacccagtaatgggatggctgggtcaaatggtatttctagttctagatccctgaggaatcgccacactgacttccacaatggttgaactagtttacagtcccaccaacagtgtaaaagtgttcctatttctccacatcctctccagcacctgttgtttcctgactttttaatgattgccattctaactggtgtgagatgatatctcatagtggttttgatttgcatttctctgatggccagtgatgatgagcattttttcatgtgttttttggctgcataaatgtcttcttttgagaagtgtctgttcatgtccttcgcccactttttgatggggttgtttgtttttttcttgtaaatttgtttgagttcattgtagattctggatattagccctttgtcagatgagtaggttgcgaaaattttctcccatgttgtaggttgcctgttcactctgatggtagtttcttttgctgtgcagaagctctttagtttaattagatcccatttgtcaattttggcttttgttgccattgcttttggtgttttggacatgaagtccttgcccacgcctatgtccgaaggtaatgcctannnnnnnnnnnnnnnnnnnnnnnnnnnnnnnnnnnnnnnnnnnnnnnnnnnnnnnnnnnnnnnnnnnnnnnnnnnnnnnnnnnnnnnnnnnnnnnnnnnnnnnnnnnnnnnnnnnnnnnnnnnnnnnnnnnnnnnnnnnnnnnnnnnnnnnnnnnnnnnnnnnnnnnnnnnnnnnnnnnnnnnnnnnnnnnnnnnnnnnnnnnnnnnnnnnnnnnnnnnnnnnnnnnnnnnnnnnnnnnnnnnnnnnnnnnnnnnnnnnnnnnnnnnnnnnnnnnnnnnnnnnnnnnnnnnnnnnnnnnnnnnnnnnnnnnnnnnnnnnnnnnnnnnnnnnnnnnnnnnnnnnnnnnnnnnnnnnnnnnnnnnnnnnnnnnnnnnnnnnnnnnnnnnnnnnnnnnnnnnnnnnnnnnnnnnnnnnnnnnnnnnnnnnnnnnnnnnnnnnnnnnnnnnnnnnnnnnnnnnnnnnnnnnnnnnnnnnnnnnnnnnnnnnnnnnnnnnnnnnnnnnnnnnnnnnnnnnnnnnnnnnnnnnnnnnnnnnnnnnnnnnnnnnnnnnnnnnnnnnnnnnnnnnnnnnnnnnnnnnnnnnnnnnnnnnnnnnnnnnnnnnnnnnnnnnnnnnnnnnnnnnnnnnnnnnnnnnnnnnnnnnnnnnnnnnnnnnnnnnnnnnnnnnnnnnnnnnnnnnnnnnnnnnnnnnnnnnnnnnnnnnnnnnnnnnnnnnnnnnnnnnnnnnnnnnnnnnnnnnnnnnnnnnnnnnnnnnnnnnnnnnnnnnnnnnnnnnnnnnnnnnnnnnnnnnnnnnnnnnnnnnnnnnnnnnnnnnnnnnnnnnnnnnnnnnnnnnnnnnnnnnnnnnnnnnnnnnnnnnnnnnnnnnnnnnnnnnnnnnnnnnnnnnnnnnnnnnnnnnnnnnnnnnnnnnnnnnnnnnnnnnnnnnnnnnnnnnnnnnnnnnnnnnnnnnnnnnnnnnnnnnnnnnnnnnnnnnnnnnnnnnnnnnnnnnnnnnnnnnnnnnnnnnnnnnnnnnnnnnnnnnnnnnnnnnnnnnnnnnnnnnnnnnnnnnnnnnnnnnnnnnnnnnnnnnnnnnnnnnnnnnnnnnnnnnnnnnnnnnnnnnnnnnnnnnnnnnnnnnnnnnnnnnnnnnnnnnnnnnnnnnnnnnnnnnnnnnnnnnnnnnnnnnnnnnnnnnnnnnnnnnnnnnnnnnnnnnnnnnnnnnnnnnnnnnnnnnnnnnnnnnnnnnnnnnnnnnnnnnnnnnnnnnnnnnnnnnnnnnnnnnnnnnnnnnnnnnnnnnnnnnnnnnnnnnnnnnnnnnnnnnnnnnnnnnnnnnnnnnnnnnnnnnnnnnnnnnnnnnnnnnnnnnnnnnnnnnnnnnnnnnnnnnnnnnnnnnnnnnnnnnnnnnnnnnnnnnnnnnnnnnnnnnnnnnnnnnnnnnnnnnnnnnnnnnnnnnnnnnnnnnnnnnnnnnnnnnnnnnnnnnnnnnnnnnnnnnnnnnnnnnnnnnnnnnnnnnnnnnnnnnnnnnnnnnnnnnnnnnnnnnnnnnnnnnnnnnnnnnnnnnnnnnnnnnnnnnnnnnnnnnnnnnnnnnnnnnnnnnnnnnnnnnnnnnnnnnnnnnnnnnnnnnnnnnnnnnnnnnnnnnnnnnnnnnnnnnnnnnnnnnnnnnnnnnnnnnnnnnnnnnnnnnnnnnnnnnnnnnnnnnnnnnnnnnnnnnnnnnnnnnnnnnnnnnnnnnnnnnnnnnnnnnnnnnnnnnnnnnnnnnnnnnnnnnnnnnnnnnnnnnnnnnnnnnnnnnnnnnnnnnnnnnnnnnnnnnnnnnnnnnnnnnnnnnnnnnnnnnnnnnnnnnnnnnnnnnnnnnnnnnnnnnnnnnnnnnnnnnnnnnnnnnnnnnnnnnnnnnnnnnnnnnnnnnnnnnnnnnnnnnnnnnnnnnnnnnnnnnnnnnnnnnnnnnnnnnnnnnnnnnnnnnnnnnnnnnnnnnnnnnnnnnnnnnnnnnnnnnnnnnnnnnnnnnnnnnnnnnnnnnnnnnnnnnnnnnnnnnnnnnnnnnnnnnnnnnnnnnnnnnnnnnnnnnnnnnnnnnnnnnnnnnnnnnnnnnnnnnnnnnnnnnnnnnnnnnnnnnnnnnnnnnnnnnnnnnnnnnnnnnnnnnnnnnnnnnnnnnnnnnnnnnnnnnnnnnnnnnnnnnnnnnnnnnnnnnnnnnnnnnnnnnnnnnnnnnnnnnnnnnnnnnnnnnnnnnnnnnnnnnnnnnnnnnnnnnnnnnnnnnnnnnnnnnnnnnnnnnnnnnnnnnnnnnnnnnnnnnnnnnnnnnnnnnnnnnnnnnnnnnnnnnnnnnnnnnnnnnnnnnnnnnnnnnnnnnnnnnnnnnnnnnnnnnnnnnnnnnnnnnnnnnnnnnnnnnnnnnnnnnnnnnnnnnnnnnnnnnnnnnnnnnnnnnnnnnnnnnnnnnnnnnnnnnnnnnnnnnnnnnnnnnnnnnnnnnnnnnnnnnnnnnnnnnnnnnnnnnnnnnnnnnnnnnnnnnnnnnnnnnnnnnnnnnnnnnnnnnnnnnnnnnnnnnnnnnnnnnnnnnnnnnnnnnnnnnnnnnnnnnnnnnnnnnnnnnnnnnnnnnnnnnnnnnnnnnnnnnnnnnnnnnnnnnnnnnnnnnnnnnnnnnnnnnnnnnnnnnnnnnnnnnnnnnnnnnnnnnnnnnnnnnnnnnnnnnnnnnnnnnnnnnnnnnnnnnnnnnnnnnnnnnnnnnnnnnnnnnnnnnnnnnnnnnnnnnnnnnnnnnnnnnnnnnnnnnnnnnnnnnnnnnnnnnnnnnnnnnnnnnnnnnnnnnnnnnnnnnnnnnnnnnnnnnnnnnnnnnnnnnnnnnnnnnnnnnnnnnnnnnnnnnnnnnnnnnnnnnnnnnnnnnnnnnnnnnnnnnnnnnnnnnnnnnnnnnnnnnnnnnnnnnnnnnnnnnnnnnnnnnnnnnnnnnnnnnnnnnnnnnnnnnnnnnnnnnnnnnnnnnnnnnnnnnnnnnnnnnnnnnnnnnnnnnnnnnnnnnnnnnnnnnnnnnnnnnnnnnnnnnnnnnnnnnnnnnnnnnnnnnnnnnnnnnnnnnnnnnnnnnnnnnnnnnnnnnnnnnnnnnnnnnnnnnnnnnnnnnnnnnnnnnnnnnnnnnnnnnnnnnnnnnnnnnnnnnnnnnnnnnnnnnnnnnnnnnnnnnnnnnnnnnnnnnnnnnnnnnnnnnnnnnnnnnnnnnnnnnnnnnnnnnnnnnnnnnnnnnnnnnnnnnnnnnnnnnnnnnnnnnnnnnnnnnnnnnnnnnnnnnnnnnnnnnnnnnnnnnnnnnnnnnnnnnnnnnnnnnnnnnnnnnnnnnnnnnnnnnnnnnnnnnnnnnnnnnnnnnnnnnnnnnnnnnnnnnnnnnnnnnnnnnnnnnnnnnnnnnnnnnnnnnnnnnnnnnnnnnnnnnnnnnnnnnnnnnnnnnnnnnnnnnnnnnnnnnnnnnnnnnnnnnnnnnnnnnnnnnnnnnnnnnnnnnnnnnnnnnnnnnnnnnnnnnnnnnnnnnnnnnnnnnnnnnnnnnnnnnnnnnnnnnnnnnnnnnnnnnnnnnnnnnnnnnnnnnnnnnnnnnnnnnnnnnnnnnnnnnnnnnnnnnnnnnnnnnnnnnnnnnnnnnnnnnnnnnnnnnnnnnnnnnnnnnnnnnnnnnnnnnnnnnnnnnnnnnnnnnnnnnnnnnnnnnnnnnnnnnnnnnnnnnnnnnnnnnnnnnnnnnnnnnnnnnnnnnnnnnnnnnnnnnnnnnnnnnnnnnnnnnnnnnnnnnnnnnnnnnnnnnnnnnnnnnnnnnnnnnnnnnnnnnnnnnnnnnnnnnnnnnnnnnnnnnnnnnnnnnnnnnnnnnnnnnnnnnnnnnnnnnnnnnnnnnnnnnnnnnnnnnnnnnnnnnnnnnnnnnnnnnnnnnnnnnnnnnnnnnnnnnnnnnnnnnnnnnnnnnnnnnnnnnnnnnnnnnnnnnnnnnnnnnnnnnnnnnnnnnnnnnnnnnnnnnnnnnnnnnnnnnnnnnnnnnnnnnnnnnnnnnnnnnnnnnnnnnnnnnnnnnnnnnnnnnnnnnnnnnnnnnnnnnnnnnnnnnnnnnnnnnnnnnnnnnnnnnnnnnnnnnnnnnnnnnnnnnnnnnnnnnnnnnnnnnnnnnnnnnnnnnnnnnnnnnnnnnnnnnnnnnnnnnnnnnnnnnnnnnnnnnnnnnnnnnnnnnnnnnnnnnnnnnnnnnnnnnnnnnnnnnnnnnnnnnnnnnnnnnnnnnnnnnnnnnnnnnnnnnnnnnnnnnnnnnnnnnnnnnnnnnnnnnnnnnnnngagtgacccgattttccaggtgcgtccgtcacccctttctttgactcggaaagggaactccctgaccccttgcgcttcccaggtgaggcaatgcctcgccctgcttcggctcgcgcacggtgcgcgcacacactggcctgcgcccactgtctggcactccctagtgagatgaacccggtacctcagatggaaatggagaaatcaccggtcttctgcgtcgctcacgctgggagctgtagactggagctgttcctattcggccatcttggctcctccaatccccgaagatcttcagatacagggaggccagcactaaactgtcagactgtgaatgttcttaccactgcaccatcctacccttctgatagtgactcataaatcaaaacctataacatcatacacagcatgatcgagacagtgttttctccctagtaatcttgcctgtagtgctggtgtggtgtttttgttttgttttgttttgtttaatgtgctgcctttctagagaatttaccaatagcccatttcatcatacctcatctcaatgccagcagtgtgctcccatgaattgaatcacccctgggcgggtgtcataggacggaaaatccttttagaaatgggagcaagctccctgtgatgcaaagaatattagcctggaagtcagaagacgtaaattttggtgtcagcttggctgccattatctggattgtgtagtttttccatccgtgcaatgagtgagactagcagtttcttcttggtcttggattatgtacttgtgaggtaccagagggaagactagtttgtggtgaaggcagtggtgcaggtctggtagcctgctgagacataaggaaacaggtcatgtaattactgaggggcagcttggttttagtcttaattttctgcctggctgctgtgtgagttgattttctgacagagggatatccctcttacaccttagtgtctgtctctaccagtggatacccaaaattttttttcttctttaaaaatattttcctcttatggcctcatttaatgtcagttaaatcaagtaaatcttcatttctagctactgtttactgtttaatagatctggtctattaaaacacatttgtaattaaaatctcattatgtttcactaattccagaatccttattcttatagaaaatacaatcttaaggcagattttttcttctagtgtttagaaataggtaactatgatttttataaagtggcatctgtttggggaaagatatctactcttagttcctgtctaccagagctcagctttttgttaaagccatcatttatggaggactctctaggacccaggcactaggactttccatgtattgatttactttatttttaacccaccctgtgagattatgtattattactgttcccacattacagatgaggaagcaactgaagaacgggaacattgactaatttgcccaaggtttttcagctaatagagctgaggcttgagctcagaagcattccttccagagcccacctcctaaccacagtatatactcagctgcctgataagcagttatgccacactccattgttgaagggtggtgactaaactgagctgctcaccacacaactccagagggctcctttgatagcatggcccatgtgaatggggcctccggatttgaatactccagagttaaacaagcagtagctgtttctaagcccatgtcattttttggtatctactgaccattccttgtttctgtatgcatgtgcaggcatgcatgtctacataggcacacgcttgagtcatcacacacggacagtcttgcacctgcatatactcttgcacagttctgttgtacataccttatggctatttgcagaaaattgcccagttccaatctaattttttcttaccaattatgtgttaaagtagaattgctgactttcataagcattttgagaactttcaatgttttatgaaacttttactgtattccttttgaaagttaataccaagtagtttagttcagagggagacactctggatgggccagtaacctaaatcctgcggccttgcattggcaagtgtggactgtgaataaaggtgtcccctctgcagggtggtacttgaatcccaccacaagggtttttcagggcaaggatagtactctccggccattctgtttccctgtacctgcagctggtactgagagcagtgacaagagggtagcatccatctgtgcaatagttttgtgtctgtaattttggttcaatttatttttctccttaggcaaccagccacagcaaggagtgactccgtatgggcatccttcacacttctgaatctgcaagaggagaagacatgacgttttatgtttgcactgaaaaacagaaaatcaaatttaatgcattagtcatcttaaaaatgtccctttttttcatttctttgacattttactatattttatgctacatctcacaaaaaaaaaaaaggtgtttaaacaaaaagccaaggagaagttgtggtttgattttgttgaattcacctttaaagtaggtttacaaatgtgaatcatgcaggcaggcctactcccggaagagtgtgctagcagaccttttgaaattggtgctttttttgaatctcacatttctagaaagaatggattatgatggatctaaggtatttatgtatttcattcattaatgatgacgttgttgttttttttttaattttattttccaaactgtgctggaccaaactactgatttgaaaggcatgtcagatcttgacagaaacatggcctgtttattctgcattcacctgtgatggtgaaacggacatttatttgcatcgctctaatttgaaatgtttgtaatctcataagcactttataaactttgttcttatttatgtaggactcttctttgcttttgttgtggtcaaaaggtgctgaaacagattgttgcttagtacttaaacttcttaaaccaagaacctaaaccaaggtttctttgagagccgccctaagatgtgcggaaacctgttagaagtagctgtactcaaatttgttttgaggcaagatcattgatgagagtcattgtgaaggtacaacatgtaaatcctaaaggcctgaaagaactgcagtggaatcgtccaactatttattgccagttttggttctcctgaaccttatgccaccttaaggggaaaaaaaaatccagtagctggcttgagattccagtgctcacacttgacatggtttccagagaatctggccccaaagtccagaaggctctggttttcataaaaggtgtatttgctgtttattttgtatggtaagtatttgctcttttgaatttaattattactgtcagtgtcagtcttggttgtgtattgcatatactgtatttataaattggtgcaaaaagcacaagtaaattatacatcaaatttattataaagaaatagtaactattttaactttgttcaagtatgtggtaatttgctcctattagagtaaaaaagaaaccagtaaattatcagtttgtgtaacttaagagtattctatataatatttttttagatttagatgcataaaattttgaatgtgaaaattgcagggcattttaaaacatatgtgggggatattttcccatgttctctgttatttcattttcttttgccatatgattttacatataatatagtcaagcatactgtgaatagacttgtctataatgagcagaccatgtaaatctactttttttaaaatgtagctagtacaactttagtagacattttcttttgcaaatcattatctataaataatttatatcttcctgggtgagttactcattgcaaagtttgactcatgcaaatgacctcaaatacatgtcagcttactttgctgtggcaacatccatgtgaactgctttgtacactgtgaaaatatttcactccagcctgcccattttgtgtttactctgggctggaaaagactttgccaaaacattaaaaactattcttttcactaaattaatagtctatctgctttcagaagatgtatctatctgtacacatttttgctggttttgtatatcagattttttcctctcaagaaacatacttagataagctaatgaagttgttttcttcaaagtaatatatctatataatgactgcattggcaaatcaaccgaaatgtgaatgttgtgcctagtgagtgagtcatgttccatcattatttctttccaaatttctttgccagttcagtttgaaccatatattttgtagctcagcattgcaaacaacagtaatactgttttaagaatgagtgttataattgcatagcatttgtatgcactttatactttgcagaggtgagttaaattattaatcattttgcacatgaaagctgtggggcatatcttttttctttttttaggtgaggaagttatgctacgactctaattaattccacgattctattgaaagttgaggaatgctgttttacccctgcgcattataaagaaaataactagaattactttagtcttcagattttctccctgttaattctgtatcttgagaggtttctttttttttttttttttttgttttcttgcaaatgcattcttttgcattaagatggtcacaaggtaaagccctgtggcagaacctggtactttaccttaccagaggaaattaccttagaataagatggagcgagaccccagctccccttaaagacaagaccttgaaatcaaatggagtcagctatacctatcaatcaatcacagttcttggatataagaagcccatagactctcttgtttacactgtaggctttttcttaatagggttgcatttgtcagtcattgcatttacccttcttggcctggaagtagaggagatcaatgcgtagctttgaccacttccagccacagggtactaacatcagacataagttgcaaccaggtcacattttaggctgagatggggctaactgaaagtcagtgtgatgaaaacccaagggcgctattccacatgtctcaaatgattggcaggggctaacttattagtaattctcggttttgtgcactgagatatctaagacctatggcatttttttcccatttataaagctcctataattcttaagtaagtaagtactaggtgaatgtttgaatagatgctggagaaattacactggaaaaccccacccctagatttagataagatcaatcatttaatattccccaaattaattcaggttgaattaagcatgtaatataaattcagtgaattacaaaaacacattttgtgtaggattgatcagattttaaatacagtgaaacttcattatatataatagacctagaccctcccaagcattttcccatcccataaagaattaatgaaatgaaatgcttatagagcaacgattcctgctcagaaaaatttccttataaacagctccaaaccaggggtgcctgagctagattttaaagttataaagaagtttcattgtatttttaaaacctttttaatgggtgtatttggacaaaaataacccccttttcacattttatgatgtgcaggtattacattgctttttacatgtggaaaagtgagcctgcatttatttttaaatgcagttattaaaacatttttgtattccccatcaatgaaaattttcagtgtgaacaaatggtgaatcataagacagttcagtgcttattttctgtaggttttagcaaaaaaatttataaaccacaaaatatttatacatcaggatggtaaatttacatcataaagattgcagatttaatattttccattgtctctgttctgagtgccatgcttgtaacattgataggaggtggacactaggcaactggtattagaagttcatttttttactgaaaaattcaggtacattagccatttgttattttatagtgaaccgtttcaatgtttgtttattgttatttgttggcaaaataaaagtgccttaagttaaaagtttgttttgagatccattaaataaatcagtatcatcagttcataatgcatttatttacaagtccttttattttgcatgttcattgtaaatttaatactgtaaatgtattcaaattcatttacatgcctatggctgcctttgattaaacttcttccaaaaaataaattctgcccagatgttgttgactttattatttcatgtcagattacttgaatatacgttgctgcataatcactaccaagtgggttctttgctgtgcatttgtatatcccagaatcggaggtttggggattctgaatgactagggtaccttgtaagtgaagctgctcacttccatgtgtcctctctttacttgccgttgagagaagggagtggtcaggcatctcccacgtgatttctggcttgggaactcccaaggccacacagtggagctgaaaggctgcccctgtcctggtgacaatactcctgggtggacgatttgtaattcggggagggtaggctacaatcattactggaacagtaatcagtgtatgaccaacactattttgagccttacagatatagtttcctctgtcataagctgttgcttctttaatgactaaggtgccattgtcatgcaatatgtatttcccattaatttgaggcctgtctactacataaccacttggcatagtccatttgatatttggcttagggattccatcagacacacaatgcagtgatagagattctccactgatgccttttactgtccctggtgcataggtaagaataactggcttctggccaatttctaatatgactaatttctcaatatagccaactttattcctagctgcacagcgatattttcctgcatcctcccgagttgttttagaaatgataaaagaaccattgcttgctatcagatactgataactttgtggtccattggaaaatcgtgtgccatttggtaaaatccagattatttcaggtggtgggttaccatcaacagagcaattcaatgctgtggactttcccagctgggcaactattttttcattaaatggatttctaaatgtcggtcttctcagcatttccagtacttctaactgtactaccaacacgctctctccaccttcatttcgggccacacagataaagtcggctgaatctgaaagcctcacattcctaatttccaaggttccatttttatggactgtgattctgcttccatagtatggggctgtgaggaaaatattgtctggcatgatccacatgacttcaggagatggtgtcccttcagctctgcagtcaaagtgttttttggaatgtctcacagctgtggctttaataacagttctatttgtatacagaccattgattaatggaggtttagagaccacatccagtttgtacattttggtgtcatccccactgggatttcgggctacacatacgtactctccagaatcgagcagtttcactttgttgatggtcaaagacccattggcatgaaatgtgtacctatcaatggagaaggaaatcatgtcattggaaggcagcaaccaaaatatttttggtttgggatccccagtgacctcacagtcaaggacagctgtgtctccagctttgattctcttgttggttttgttactctgccttatccggggagcagctgttataactgttaagtggaccttcatttcatctttccctagggtgttctgggcatagcaagtataatctccttcctccgctaccccaactttgttgaagtataaagttccattgttgaaaagggtatatctcctagtcctgtggccactgtcatcggcttgcattgcattgttgatcatggttccatcaggcaaactccaagatatctctggcactggggagccggaagctttgcaatctacttggaaatctttcccatggagcacttgctttctaaaatactgcttgtggtcaattttggcaggtttcagtcttaggctaacatgcatcagtatcagatcatcccccattttgtttcttgccacacacaagtagacaccactgtctttttctgttactgatccaataaacagggatccattagggtagacgtggatccagctgcccactctaaggagaaaagagattcatttgagtgtgcagctgttagcaatgagggaaactgttttactcaggattgcctccctctgccccagctttattgaagcatgaccaatgaaaattgtgtatctttgaggtgtagaacatgacattttgagagagatatatatacattttgaggtgtgtgtgtatatatatacacatatttgagatatatatatatatacattttgagatatatatatacacatacattttgaggtatatatatatatagagagagagagaaatgaccacgattaactagcatatccatcacctcatagttacctgtttttgtatgtgtgattagctttaaattgttgcaataaaaaaataaaattactaccagcttattgtcttctaagccatttgctgaaagatgaaattatctaattgaacaggtataatttagtgcaagtaagtatttctcagatggaattcaaatgaatctccgttacatagtaattttttaaaaaaaatcttaatgaagaggcacatgctagaaatatgggagttctagacaccatgacttccttgaccatttcacataccaagtaaactaattggatccacaaacatggtgattttgtaatatatataggtaaactcagttgctcagaaaagatgccagatgatactttctaaacagttattagtaacaaaacaattactgaatcatttggttagaaaattctactttggctgggcacagtggctcacacctgtaatcccagcattttgggaggccaatgtgggcagatcacttgagggcaggagtttgagactagcctggccaacatggcaaaaccccatctctactaaaaatacgaaaaattagctgagcatgatggcacatgcctgtgatcccagctactcgggaggctaaggcttgagaatcgcttgaacccaggaggctggggttgcagtgagccgagatcacaccactacactctagtctgggtgacaaaaatgaaactgttttagaaaaaaataaattttactttgttagaataccaacgcaaggttccttagaaggttgttgcagcatctgccctctatgggcagctgtacagtgactagtttttgcactagattgagctgtgtggaataccatttttctccagatgtacagtggctgcacagcctatcattaccaaatttaaccaccagatggcagatctttcctggtaaaactaaatctacttttttagaccagtggagactcaactggtgctaaaagtgctatcagggatacctatatgagaaaacgtctttcttatttttgggcaacatgggctaagcaggtagataaaacgagaggaaagtaaaaactgttttcatagcataagtgctaaccaagtcaaacagcctcaagtcatttctctctctcctattttctatttactttatatttttttgagacagggtgtcactctggagcccaggctagagtgcagtggtgagatcacggctcactgcagtctcaacctcccaggttcaagcaatccaccaacctcaacctctgagtagctgggactacagacacacaccactatgccctcctaatttttttattttttgtagagacagggtctcactgtgttgccaaggctggtctccaacttctgggttccagcgatcctcccgccttggtctcccaaagtgctggaatgacaggcgtgaaccaccacacccagtcatcaagtcactgttattctccagcaaaggtaagtatggaaagtattatagtaaaatattagagaaattttttttttccccaagtatggaaggaagttctctggcatataaaccaaagtaaaatcaatacaaatacacctaaaggaagagaaactgccaggtgctttgcactggttgtttaatcttgaagtaattccctcactatacagctgaaaaattggtatttagagagatttagcaacttgccttaggtcacagggctggttctcaagccttacgctttccaccatgctatactggcattctttcctaatgctttctaaaagtattggttcttaaacttggctaaacattaaaacacttgtggagtttaaaataataatgataggtctgagtctcacctccagaatttgacttaatatgtgtgcagcatggcttgggcatcaggattcttagaattttccggattaaaggtttccatgtgcagcaaagaaccactgttctaactgggttctcaatgaagatccctcatcagctgcattagaattacatgggtcgagtttaagatgcatattccccggctttggtttcctgaaattctgcttcaataggtctcgccaaggatgtagaaacccactctttaaaaaacttcccagctaacataaataattaagtttgaacacaagtgtcaaattttagcaacaaaatcacctggagggcttttaagaacagattgcttattaaaacaaaatcagagctcctgattcaacaaattcccagacaatgctaatgctactggtagggggtcttcccttggagaaaaactggcttagagtgatatcccctgcacccaagatctgatgcaactggagattgtgacatataacagacagaactattgatgtttctttttataaactaatatttttgagagagataatttacttttgaaaatagaaggtttcccagagtggaagacagaattcttaataaagattaatgcagaggcatcttcagcctctccaaagcacaaaactcacatttcataactcagcatttaaaaattctaaatctaaacaaatttcaatttaatttaggtgatttttgatgacatttgaaaaacttgagaattaacatttacttttgaactaaagatcacaagttaaatttattagctgtattcagtatcaactcgtgtcattagaaaaaaatcttcaactcctaagcatgagtacaaattcacatttactatgtgtaatttttttgcatggatgttttctattaatgaataaacagatatataagatggaaattctcatcctcattttttgtcctgtaatggaaaaccattgtgtaaagtcatgccacttgcaaaaaaaaacctcataagctataattattgatttttgaagatataatttatatagaaagccagctataaaatgaatattgaggccaggcacggtggctcatgcctgtaatcccagcactttgggaggccgaggcgggcagatcacgaggtcaggagatcaagaccatcctggctaacatggtgaaactccgtctctactaaaaatacaaaaaattagtcggatgtggtggcgggtgcctgtggtcccagctactcaggaggctgaggtaggagaatggcgtgaacctgggaggcggagcttgcagtgagcagagatcctgccactgcactccagcctgggcgacagtgcgagactccgtctcaaaaaatatatatattcatatgcctataacagaccagagaaagtgtgtatttgtatatatgtgtctcatcacatcagaatgcgggggccctgaatatgtttcacttggtggaggtcttaatattgtgactttcacaaagtgctttgtaattttaggaaagaaaaaattaagtactgattataatgaagtttaaaatgtcgaataggggactcagacgagtaaaataacggagtgtctctctctagaatctccactgcatcataaaaattcccttctctgttttgtttacagagagtgtgaatatatttatacaattactattttttttttttttttttttgagacaaagtctcactctgttgcctaggctggagtgcagtggtgcaatctcggttcactgcaacctctgccttccaggttcaagcaattctcctgcctcaacctcccaagcagctgggattacaggcgcccggccaccatgcccggctaatttttttttttttttttttttgtacttttagtagagatagggtttcaccatgttggccgagctggtcctgaactcctgacctcaggtgatccatctgtctcggcctcccaaagtgctaggattacaggcgtgagccaccgtgcctgtcctacagttactattttaaaactgtgccaagtatggagataaatgagattttttaattctgcctaaaatataaaaaccctaagaagttgaccctttgagttaagcaagtgaaaagaatggtttttgtattcaaatgatctcaaaagattagttttttttgagagagtttcctttatgtccaaagtctatgtgtactctaaaactgctgctagcctcactgtgtcactttttccatttcagaagttgtacagctaaatacataaagcagataattccaacccaaaggtatagacttacctatgctgctggtcgaccacagccttggatggtaacctccacattatttggggtttgggctccccagtggctgagcagttcagtagtaatttgtccccaaaattcacttcagtccttttctgggatgcagcttctatcctggggctggtcactcgctcttccattgtaagcattactactcttcgctccgaaccagtggaactggtagcaatgcattcataagtgcccctgtctgaagaggctaggtttcttatatacaaagtcccatttgaaaataagaacaacttggaattggtaaactgtaatggtttcacttcagtgccatcagagaggacccagtaaacgctgggctgaggagttccttttgcagtacagggcagttttaaactttcaccccaagtgcctacaatgacttgcctcctttgctctagaataacaggtggtgctgcaatgacttgtattttaaccagcagtgaatcctggccacctgggttgctggccacacatttgtaaaagccacggtcataaatactgagattgtggaggaccaatgttccgtcaaccgtcaccacagcctgcctacttccctgggatgattctgagacaactgtttggtttgcaagaatccaggtaactgtagggcttggcctaccttctgctctgcacttcagttccacagtgcttccggaatgaactgtgatctctttggtacgtctctccaggatcctgggaggataggaaaccacagacaaggtgacatgaaggtggtctgtgccaaacagattggatgcggaacacaagtactgtccgcggtcctgaatttccaccctctggatggacagggtaccattggggagaacctggaccctgctattctgtttcctcttagataaatcaagtcctgagaagaaaaaaagaaaattattgctacgggtcatcaaagtttatttagaaaacataaagctatcgttttttgggctactaagaatacatttaaattaaaatgaaagcccagccctatggctca

SEQ ID NO: 796 - DNA, 5526 bp, Homo sapiens
ttttctgtttttcaggatgaatcttcaagtcatgaatgtaaccagcgcacaatccttctctatggagtcggcaaagagcgtgatgaagcaaggcatcagctgaagaagattaccaaagatatcctgaaaattctaaataagaagagcaccacagagacaggggttggggacgaaggacaaaaagccaggaagaacaaacaggagacatttccaacactggagactgtgttcactaaactccagctcctttcatattttgatcaacatcaagtgacatctcagatttctaacaatgtgctagaacaaatcacaagctttgcgtcaggaacatcctatcatctccctttggctcaccacattcagctcatctttgatctcatggagccagcactgaacatcaacggactaattgacttcgcaatacagttactaaatgaactgagtgttgtggaagctgaactgctcctaaaatcctccagcctggcaggaagttatacaacaggactgtgtgtctgcatcgtggctgttctcaggcgctatcacagttgtctaatcttgaatcctgatcagacagcccaggtgtttgaagggttgtgtggtgtggtcaagcatgtcgtaaacccctcagaatgttcttcccctgaaagatgcattttagcctacctctatgatctctatgtgtcatgtagccacctcagaagtaaatttggagacctcttcagtagtgcctgttcaaaagtaaagcaaaccatatataataacgtgatgcctgcaaattcgaacttgcgatgggatccagacttcatgatggattttattgagaatccctcagcccgcagcatcaactactcaatgctgggcaagatcctcagtgacaatgcggccaatcgctacagctttgtctgcaatacactcatgaatgtatgtatgggccatcaggatgctggcaggattaacgacatagccaatttctcctctgagcttacggcttgctgcactgttcttagttcagaatggctgggggttctgaaggctctttgttgttcttcaaatcacgtgtgggggtttaatgatgtactttgcactgtagatgtgagtgacctttcattccatgattcattagctactttcattgctattctgatagcacgacagtgtttttccctggaggacgtcgtgcagcatgtcgcacttccctctcttctagcagcagcttgtggggatgcggacgccgagcctggggcgagaatgacatgccgactcttgcttcatctcttccgagctccccaggcctgcttcttacctcaagcaacgggcaaacctttccctggaataagatcatcttgtgatagacacctcttagccgctgctcacaacagcattgaagtgggagccgtgtttgctgtcttaaaagcaattatgatgcttggagatgccaaaattggcaataacagtgtcagctctttaaagaatgatgacttcaccatgagaggtttgcgatgtgatgggaatgctgatgatatctggactgcctcacaaaatccaaaatcctgtgggaaaagcatttccatagaaactgccaatttaagagaatacgctagatatgtactgaggactatctgtcaacaggaatgggtaggagagcattgcttaaaagaacctgaaagattatgtacagacaaagaacttatattggaccctgtgctttcaaatatgcaagcacagaaattactgcagcttatctgttatcctcatggcattaaagaatgtaccgagggggacaatctgcaaagacagcacattaagcgtattcttcagaatcttgagcagtggacactgaggcaatcctggttagaactccagctaatgatcaaacagtgcttgaaggaccctggctctggttctgtggccgaaatgaacaacttactggacaatattgcaaaggcaacaatagaggtattccagcagtctgcagacctaaataattcttctaattctggcatgagcctcttcaacccaaacagtattggaagtgctgatacaagtagcacgagacagaatggaataaagacattcctaagttcctccgaacgcaggggtgtatggttggtggcccccctcatcgccaggttgccaacttctgtgcaaggaagagtgctgaaagccgctggggaagagctggagaagggacagcacttgggttcttcttccaaaaaggaaagggacagacagaaacagaaaagtatgtctcttttgagtcaacaacccttcctctcactggtacttacctgccttaagggacaagatgaacaaagggaaggcctcctaacatctctccagaatcaagttaaccagattttaagtaactggagagaagaacgataccaagatgacataaaagcgcggcagatgatgcacgaagcattgcaactccgcctaaatttggtaggaggaatgtttgacacggtgcagaggagcacccagtggactacagactgggccctgctactccttcagatcattacttcaggaactgttgacatgcacactaacaatgaattattcacaacagttcttgacatgctgggtgttttaatcaatggaacgttagcctctgacctatcaaatgcatcccctgggggatctgaagagaacaagcgtgcatacatgaatttagtaaagaaactgaaaaaagagctaggagacaagcgatcagaaagtattgacaaagttcgacagttactacctttgccgaaacagacatgtgatgtcatcacttgtgaacctatgggttccttgattgacacaaaaggaaacaaaattgctggatttgactctatagataaaaaacagggtctccaggtctctacgaagcagaaggtgtccccgtgggacttgtttgagggtcagaagaacccagctcctttgtcctgggcctggtttgggacagtccgagtggaccgaagagtgatcaagtacgaggagcagcatcacctcctgctgtatcacacacaccccatgcccaagccccgcagttactacctccagccactgcccctgcctcctgaggaggaagaggaagagcccacatctccagtttctcaggaaccagaaaggaagtccgctgagctgtcagatcagggaaaaaccacaacagatgaagaaaagaaaacaaaaggaaggaagcgcaagacgaaatctagctcaagagttgatgaatatccacagagcaacatataccgagtgcctcctaattactcgcctatctcctcccaaatgatgcaccatccacagtccaccttgtggggttacaacctcgtgggccagccccagcagcccggctttttccttcagaaccaatctcttactccaggtggctccagattggaccctgcaggctcctttgtcccaaccaacaccaaacaagctctgtcaaacatgctacagcggcgctcaggcgccatgatgcagccgccttctcttcatgcaatcacatcgcagcagcagttgatacagatgaagcttctgcagcagcagcagcaacagcgacttctcaggcaagcccagactcggcctttccaacagggccagccgggggaccaggctgctctctttgctgcgcaagcacggccctcccctcagctccctcagtatccagggctgcagcaagcacagaccatgccacagggctatacaatgtatgggacacagatgcctttgcagcagacatcgcagcagcaggctggcagtgtggtcctgtctcccagctataactccagagcctatccggccgcacattccaaccccgtgctaatggaaagactcagacagattcagcagcagccgagtggctatgttcagcagcaggcctcgccgtacctgcagcccctgactggctctcagagactgaaccatcaggctctacagcagagccctctggtgggcgggggaattgatgctgtgctgacttctgcacatccaaaccttccctccgtgcccctgcctcaggatcccatgagacccagacagccgcaagttcgacagcagcagagactcctccagatgcagcagccccagcagccccagccccagcagcctccccagccccagcagtcctcgcagtcccagagtcagacccttggtctccaagcaatgcagccccagcagcccttgtttcccaggcaaggcttgcagcagacccagcagcagcagcagacggccgccttggtgcggcagctccagaagcagctttccagcaaccagccacagcaaggagtgactccgtatgggcatccttcacacttctgaatctgcaagaggagaagacatgacgttttatgtttgcactgaaaaacagaaaatcaaatttaatgcattagtcatcttaaaaatgtccctttttttcatttctttgacattttactatattttatgctacatctcacaaaaaaaaaaaaggtgtttaaacaaaaagccaaggagaagttgtggtttgattttgttgaattcacctttaaagtaggtttacaaatgtgaatcatgcaggcaggcctactcccggaagagtgtgctagcagaccttttgaaattggtgctttttttgaatctcacatttctagaaagaatggattatgatggatctaaggtatttatgtatttcattcattaatgatgacgttgttgttttttttttaattttattttccaaactgtgctggaccaaactactgatttgaaaggcatgtcagatcttgacagaaacatggcctgtttattctgcattcacctgtgatggtgaaacggacatttatttgcatcgctctaatttgaaatgtttgtaatctcataagcactttataaactttgttcttatttatgtaggactcttctttgcttttgttgtggtcaaaaggtgctgaaacagattgttgcttagtacttaaacttcttaaaccaagaacctaaaccaaggtttctttgagagccgccctaagatgtgcggaaacctgttagaagtagctgtactcaaatttgttttgaggcaagatcattgatgagagtcattgtgaaggtacaacatgtaaatcctaaaggcctgaaagaactgcagtggaatcgtccaactatttattgccagttttggttctcctgaaccttatgccaccttaaggggaaaaaaaaatccagtagctggcttgagattccagtgctcacacttgacatggtttccagagaatctggccccaaagtccagaaggctctggttttcataaaaggtgtatttgctgtttattttgtatggtaagtatttgctcttttgaatttaattattactgtcagtgtcagtcttggttgtgtattgcatatactgtatttataaattggtgcaaaaagcacaagtaaattatacatcaaatttattataaagaaatagtaactattttaactttgttcaagtatgtggtaatttgctcctattagagtaaaaaagaaaccagtaaattatcagtttgtgtaacttaagag

SEQ ID NO: 797 - protein, 1425 aa, Homo sapiens
FSVFQDESSSHECNQRTILLYGVGKERDEARHQLKKITKDILKILNKKSTTETGVGDEGQKARKNKQETFPTLETVFTKLQLLSYFDQHQVTSQISNNVLEQITSFASGTSYHLPLAHHIQLIFDLMEPALNINGLIDFAIQLLNELSVVEAELLLKSSSLAGSYTTGLCVCIVAVLRRYHSCLILNPDQTAQVFEGLCGVVKHVVNPSECSSPERCILAYLYDLYVSCSHLRSKFGDLFSSACSKVKQTIYNNVMPANSNLRWDPDFMMDFIENPSARSINYSMLGKILSDNAANRYSFVCNTLMNVCMGHQDAGRINDIANFSSELTACCTVLSSEWLGVLKALCCSSNHVWGFNDVLCTVDVSDLSFHDSLATFIAILIARQCFSLEDVVQHVPSLLAAACGDADAEPGARMTCRLLLHLFRAPQACFLPQATGKPFPGIRSSCDRHLLAAAHNSIEVGAVFAVLKAIMMLGDAKIGNNSVSSLKNDDFTMRGLRCDGNADDIWTASQNPKSCGKSISIETANLREYARYVLRTICQQEWVGEHCLKEPERLCTDKELILDPVLSNMQAQKLLQLICYPHGIKECTEGDNLQRQHIKRILQNLEQWTLRQSWLELQLMIKQCLKDPGSGSVAEMNNLLDNIAKATIEVFQQSADLNNSSNSGMSLFNPNSIGSADTSSTRQNGIKTFLSSSRGVWLVAPLIARLPTSVQGRVLKAAGEELEKGQHLGSSSKKERDRQKQKSMSLLSQQPFLSLVLTCLKGQDEQREGLLTSLQNQVNQILSNWREERYQDDIKARQMMHEALQLRLNLVGGMFDTVQRSTQWTTDWALLLLQIITSGTVDMHTNNELFTTVLDMLGVLINGTLASDLSNDGGSEENKRAYMNLVKKLKKELGDKRSESIDKVRQLLPLPKQTCDVITCEPMGSLIDTKGNKIAGFDSIDKKQGLQVSTKQKVSPWDLFEGQKNPAPLSWAWFGTVRVDRRVIKYEEQHHLLLYHTHPMPKPRSYYLQPLPLPPEEEEEEPTSPVSQEPERKSAELSDQGKTTTDEEKKTKGRKRKTKSSSRVDEYPQSNIYRVPPNYSPISSQMMHHPQSTLWGYNLVGQPQQPGFFLQNQSLTPGGSRLDPAGSFVPTNTKQALSNMLQRRSGAMMQPPSLHAITSQQQLIQMKLLQQQQQQRLLRQAQWFQQGQPGDQAALFAAQARPSPQLPQYPGLQQAQTMPQGYTMYGTQMPLQQTSQQQAGSVVLSPSYNSRAYPAAHSNPVLMERLRQIQQQPSGYVQQQDYLQPLTGSQRLNHQALQQSPLVGGGIDAVLTSAHPNLPSVPLPQDPMRPRQPQVRQQQRLLQMQQPQQPQPQQPPQPQQSSQSQSQTLGLQAMQPQQPLFPRQGLQQTQQQQQTAALVRQLQKQLSSNQPQQGVTPYGHPSHF

SEQ ID NO: 798 - DNA, 49077 bp, Mus musculus
  misc_feature (1)...(49077): n = A,T,C or G
gggtaagccgctctcgcctggcccagccacacctcaggtgctgagagcccagcctccattcccatactccaaggtctagactcccaaaggctgtgggagataacaaagctttttatatatttttttaattatacatttgagatgtctgtagaagagaactttcatatgtcctgtgattggaatacgctaggaatgccgtttccctcagaagactagacaatgccttctcagtggtccagccagccagcctctcgcctgctccactataggcctctctagaattgttctccgccactgttttctcctccagacttaactcagcatcagctgcagccccaccctgacattcctccaggcctcagaaggcctctggatgggacactcctcccctatctcttttttcctcttatctctgtttgccattgagaaggctaggctgattccgggacagccttcaaattggccgttaagtttaagcagttaggcctaaatctctgtctccaagaactggacaattccaagcaagtccatgcctcagacactgccctgtcacctggcctgaggcagggacaatgggtcagcagcagttcccagattcctcagctacttccttggtgacatttttcagacctccccggcaagtttccagcctccacacccaggtaatggaatgtccgtagagatgggcccaacagattaacatgtaagtcacctaccccagaattccctaatgtgctttatattaggcctgcaagctcccttgggtgtgtctccatcttggtaatggagaccccaggatgctagacttctgcagaataaaacactctttccatttacacacttcaagttcggggtatcattcttcagagaatcagggacccttacaacataccatagatatcattcattaccctctcatttggttgtaagttaaattggtatagaggattttttttgttttttgtttttgatttttgttgttttgttgttgttgttgttatctattcccagtgtcatgaagagtgtctggttcacagcaggtacttcacaggaatctctcaaatgaatagcatgaatatttagaccctaagagaccccagctaagcatagtgacacagcttatgatccaaccactcagaaggcagaggcaggaggaacatgagtctgggaccagcctaagacagtgaaacacggacttagaaaaaagtaagggctagaatgagaagtagctcggtcagaatatttacctactgtgcccaaggctctggattctatctctaaaataacgcacactcgtctcaggactgcctggcagctccaggtccagagactccattcgccagccaggtttatgagtctgcttctcatctggtctttgtgggtgccttactgatatgcaagtctctctctctctctctctctctctctctctctctcacgcacgcacgcgcgtgcgccaacttaaatgaaaaaagtttagaagcaaatataaataagtaggtagttaacatttccttaagctgaaaatatgtgattaaagtgtatttggtttatttttagaatnnnnnnnnnnnnnnnnnnnnnnnnnnnnnnnnnnnnnnnnnnnnnnnnnnnnnnnnnnnnnnnnnnnnnnnntaactgtaatagttgtattctttattggagaacctgttcatcttgagattctccagaaaaaaaaaatccgatattttgggccaaatttgaagcaagctttattaaagagtcagtgctgatcaatcgatgggttttggtcaggaccgtccccaggaattccctcctgagaatggcctccagccacaatccgcaggggcttataagggcaaacctacaggtcgctgtgctttcccatgatgctttgttaatttcccaagaactacaattcccagcattccaggaagttaccctcggtgggcaggtgggaccttataggttaatttggggcattactaacctttattgttaaacattttgtgtggaaattaccccctacaaagggcagaaacatttatttcaactttaacccagcaccatcaatattcaataatttcctaatcccaaattgcttttgaaaatgttaataaatttaagctcttcttgaaaagaatacattgaagatgatagaattgattgttgtttttttattagtggctttaaataaccccgctcccaacacatcaataaggtgacaaggtcatattagcaaactaccagttcaaagtgagggagagaaggcctcagtggtggtggtagggggcatcgcatcccctgccttcaaggcagatgctgaagagccaggttctggggaagtaggtggtggcagagccacatgcagagaccccacaggtcttgtctcccgctttagttgtcctgcccaaggtacttatatggaacaaatcaaggaacactcagaaaaccctcacatgaccaacactctgacccatcaaggaaggagtgcacatctctgcatacttccttcacttcagagcatttggccacctcctaaggcaggtgcctcaatccttccatgtatcaaggtgtcacctgtctcagaaccttcagaccaacaacaagggtcagattgtagctcaaatacaacgtagggaaatgctatatatccttcaggaacaaatattgcacttgagtgaaagatccaacatcagcaatcagcaatgtgttggcatcagcaatcatgtgacatgtgggagaatgacaccccatcccggtgtaaagaaaaaaaaaagtgaagccttatagagaagatctgttgatttctcagacagccatggaaagaaagcagtcgtcatattatcaggtgctctgggctggtcacactgtaggactgtaggtgactttggtttcagagacagtaaactgtacctctggaaccctgacagcaatttcagcctagaaatcattcactcaggctgggcagtggtgacacacacctttgatcccagcactcaggagacagagataggcagatctctgtgagttggagagcagcccagtctacagagggagttccaggatagccagagttctgtctccaaaagcaagcaagcaacaacaaaaaagaagagaggagggggagaagaaaaagaaaaaggaagaaaagagaaaaagggtggaaggaaggaaaggagggagggagggaggaaggaaggaaggaaggaaggaaggaaggaaggaaggaaggaaagaaggaaggaaggaaggaaaataaattataggtctacagaggattttatatagagaaaccctctctcaaaaaaaaaagcaaacaaacaagcaaaaaagaaaaagaaagaaaagaaattgttagatgcagagaactcaataaagggtattgagcctgagttgagggtggtgggagagtgggggctgaggaaagtaaagatcatgacctaacactccgtgccttagcacacctgttgctttctctagcctccattaagtcttttaggaaaatttgacaggatagcgttgagactggtgggggagagggaaggaaagaagagggggaaggagggggaagaaagaaaacgagctaagtatttagtatcctttaaagcacagaaaagcatgattacataatgcagtgagagcagcaggttttgctctgcctccacaccctttttaatttcacattagatatggaaatcctccaagaggaaagcggaagcactcaatttgaaattatttagaaaatagagaacagatgtaaatagttgaaaatttaaaacgaaaaaaaaaaaaaaaaccacccacagcccatttactggaagaggtcctgacaatatgtttccatacagcttttctctcctcttagctgccttgttagaactgtgtcttctatgtcaactgtgctgaaattaggcaatatggatacattatcctgagataaataaacaaaagcataagctgtacattatttttgatctttaccttgtgttgtgtgttgtacaaaatgtagttgatttcacttgcccatcctagcgagcttgggaagaaatagattctgttgttcttggatgagctactatgtatctattcagctgggcccagtttcactgtgtccttcctagatacttatctttatgtgtctaagaaggaagagttgtgaggatctaattaacctccctcctgacaatttgctgtttgcctcacagacggggacactgctataggacacataaagaggctccagttttctcagaaaactgactttttcattatgcagtgttgctcttaatctcagataatctcctggtctgttgtactttgaagataaaactggtgctctggcttcctggggtcatttctcatctttctaaatcgataagcttattgataaaatgaaggtgaatttctcatgaacaatgagaatttttaggtcctgtattttagtctttgttactgtttgtcttttcatattgattttctcttttttgctctctctacttttaattctacacattattagattccgttttcttctttttcttactctatcaatatacatctttccaaaaatacttcttaggggttgctctaatcagattattttctaatttcacaatagacattatccactaatctcagtccactattaaataacacagagactacatgatctgacagaacccgcagtgttttctgctatagcacagtgccctgtgttgctacacatacctgctatcctggcacttgggagagtgcaacaggataattaggggtttgataccagcctgggctatctgaaatgggacacagcttgtgatagagcatttgtctgacatcatgagttaaatccagcattggaaacaaataaaaataagccaactattttgtttcccagacaggtcaggttctgccttgtagacagtttccagcaatctgtcctctcccttggagcttatcatttataaattacaatcatctttaaagtaaaagatttagtttcatctttatatccttcctaaaggatacccttcatggaagtctgagttgctgatttatatcatatttcctctctctgtagaattttatttcatccagcactgttctcctgtaatttttaagggttttgtttgtcttaggaaagccttcttttttttttttttttttttttggttttttgagacagggtttctctgtgtagccctgactgtgcttgaactcactttgtagaccaggctgacctcgaactcagaaatccgcctgcctctgcctcccgagtgctgggattaaaggcatgcaccaccacgcccggtttttctttctttttttttctttctttttttttttaattctccaatcatcagcttgaaaccccagtgaggttcataaaagcaacgctgactgacctatgggtgcttccacaggacgacttcacgcaccgaaaggtcccagctctagcctctgtacccttgtacccatttgttgatgactcttcaagtgccccccagcctggcactgcctctatgggctcttgctcctctagagcattcaccgagctcctccgctgtcccagaatagtccaagctgtgatctcaattctctaaagaagattgttggtttctcagtttgctccacgtttttcttgtcataatctaagggaagacttccaagccctttgagtgcttgaggaaaaccaaaaactacaaatcttagtgttttacgcagtttgtaactttgaccacacaaaaagatgatgaaaagctgatgtctaagagtaaatgacttttctaattttacttgcaagggaatggatggactggagatcctaatgtaaaatgatagcatccagactcagaaagacaaataacctgtttcccctgatatgcagatcctgatttaaacgtgaacagacgtaaaaggggaaccatcagggaggtaaaaggggaaccatcagggaggaggaagaggtttaagaggataggagcaggggagaacaagaaaaggtaacaagcggaaacagaaaatatcaagagccttctctcatatacagtctgtatttgagcatgtgtgcatatgatggagggagggagggaaaggagagagagaaggagagggagaggagagggagagggacagagagagagagagagagagagagagagagagagagagagagagagagactatcagggaaaagaagaccagtaaggtggcttgaaggtctgtctacatggaaattctaaagtgtctcaccagcaatatcacatgtcaccgaggaatttgtggctcatctttttgagttcttaggcttattaataaaataatttaataattgactcagaaggacacttctgaaaaaaagaacttaaagggaaaaagcctaggacccgcaagcttcaaaagtcaacagccactcagaggaggaagatggagaggaggaaatggagacatttcaaggcagccacacggtggatgatcgggggtggtggcttctgagaaatagagggggaaggtatatgtatgttctgtccaatatcctaaagaaagagacagaaagtaataaaaaggaaaagttacacctttctgaattcaggtagcagaccctcattgagactccctctatgaagacctcatcagagctgtgaggaaggcattctatctcgataaagggataattattcttcccacctctttatcatcccttaatgtaagtcaacctttccaggtatggtcagtgagcctgtagactgaccagcccaactgcattaactctcttgttttgggaagcttggaatgttaggtttcccctaggccattgaaataacatttctcttaaggagactcatcggaacaccaatacagacttctgtagcatttccccctctgaagaggtaaccctaaaatcgtttaggctatgggacaaagttgagcactaaatatataaagcatttttactgtgaaaatctagatattcaattctaaagctttgccagagggaataaatgcctggactggactttcagtcccaccccaggtatagctccagggctgggtgctggttcacaaggagttaactccctttagacattcccagccagagagccaaggactttcctggaactgcctacaaactgttctgccaattcctgtctcctggtctcatcagatggacagtaaagaggagtgggagagtgaatataattaggatacaaggatgtcaatggatgaaatgtcataactaaagtccattattttgtatgctaagtaaaaaaaaaatttttttaaacactaaaagtgactttcctagagaaatagtgctaacagacgaagctaaagttaaaatctagatcttacattatagacatttatgtttggttattagtgcaaaaggtgcaatctctttaaaagtctgtatcagagtctttcaggctagggctctctttagtatgatgtgcgaagcactagacagaaatgtccatagaaagagctctcaggcctgaaacgagctccaacatacgtttacattttagggaattctcaacagagggagtctgtttttcatatcagtttaaaacaatagtgaagggtgtggccacagggtctctttggtcataaagtgatgatatcttagattctgtttatgttctgtatctttgggaaagagtctgggtctgtgtactgttggcttaacttggaaactgtgctgactctgctccagacagctgcagtagagcaaagacagtagcaacgtgaatcatgggaatgttttgcttgcccagtacatataaaagttcctcctacagtgtcttctactgtgtgtacaatagatgatgtctaaagagtatgcaaacctatcttagtttgaaatactcagttgggcttcctctgacagctgagaggaacagatgcatagacccacagtcaaacattagtttcatagagcccaaattggagatctccactgggttcctccccttgggctccggagaccccgtggaagaggcggggaattgtaggaaccagaggaacacaagaacacggcccacagaatcaactaagcagggctcatagaggctcacggagattgaaccggcaattacagagcctgccatgggtctgcgttaggtcctctgcatatacattatggttgttgccaaaacaccttaatttaatgtggaaaaatttaaagaaattaattgcaaagtacataaagttaaacttaataagcaaatctctgcctgtttatgtgtgcacataaacaggaagtttctcgattttttcaatcactaaattaatcatttctcttaagaaaatgaccttctttctttcttcatgatactctgcctcccagtgcagttctctgatggatgtagagttgaaaagcaaggcttcctttcaagaaaccttatctcctaacgtctccacttttcttctctttcttgtgaatctcacatgaccagatagtggatggtgtcagcttaatccactccaagaggcctgcctgcctcaaactcagactaggccaggacctagcacttcctcttcttgaagttcacatctgtgtcttctgctgtgctagtatccggcctagagagacagccttgctgtctaggagaggtctgtcacacacacacacacacacacacacacacacacacacacacacacacaagagcgcgcacacagacacatatggacgcgcgcgcacacatacacacacatgcacgcacacacacacgcacacagtcacacacacacactcacacgaacacatgcacagagagagagagagagagagagagagagagagggagggagagagggagacagagagagatgaacacacacacacacaaacacacacacacacacacacacacacgagcgcacacacagacacacatatggacgtgcgcgcacacatacacacacacgcgcacgcacacagtcacacacacacacacacacacgtggttttcagctacagaagaggcaggtaaatctacatcatatgctagtggttgcttttacctctgaatctcaatcggatgtccgaagcctgcactcctgtccattgctcttgattcttacagctctttaggtggggtgggatacagctactgctctggaacgtgatgcacagcctggtttcacaggaaagcttcctggaagctattttcaaagaaattacctcccgggccaagctttattttccgcaactccagtgtatggatttgtataaagccacctcccttgtctactgaaatgtgccagcaagccacaaaggcatttagttcacattacagtagcacacattaattgtttacatttgtctaagctcatgattccagctacatgggaggctgaggcaggaggatcacagagtctacttgggctgtggagtgagcgttaagccagtctaggcaacttcggaataagctgtctcaactttaaaaagggggaatgagagttgggagtgcaaattaggagagattgcctaacaacaaaggcaaaccgggatggaatgagcatttattttgtaactgtgtgaggtagctccggctttgtctcatccacaaactgcacaattaaaggtgtggtgtttagcagaaggtgacttgctactcactgaacgagctcttctttaaaggggggggggggcacgacactctctagttaactcgctgactgacagagggcctgaggactccttagtcacctgactgagctccagccctccgctgggagggtgtcctgagcctccgcctgggagggactccggtctcccttcagattccggcaggaagtccgcacgcgtccagggaagagtcagcgcagtgagaccccaccaggtcacctgagtctaaggtgcccctgggtctgagagccgccctgcaaccttcagctcctcgggaaaactcgcagagcaagtaagtgccagcactcgtgacgtcagcccagagacaggcgaagctgcactcagattggaggaaattaaaggaaaccagaaatgaaatctttaaactagagcaggcggcattgatcgagcgccggcactatcttaaacgcaggggaggagctgcttaaaactttaaagtagtcgggagaaaaagcagatataccagtaatgaaacgaaagtagtaaattttttagaaagaatgaatgtagcttaataaaatattaagtggatacttaacacgtaaaccttagaatccttggacttaagacttttccacggaatgttgaaagcttttaccttggagaaatacgaactatttcgatagctgctgcctggttggtaatctgtctaaggtaaacgcgtgtgggcaggtcacgtgctacctgacccacgtgatatttatggtcctattgtctaactaaaacttgaaaaaattttaaatgaatgggagggatctagcacaagtttaaagcttgactgagctctgaagcgagtttaaagtctgcctagaaaagcttggcgagactgtctcaaatcaaacaaagtaaaaacggggttcgggtatagctgagcagagcgtttgccgagcatgctgtattattaaaaaatataataataataataataataataataataataataataataataataataataatggattttgtttgcttgcttgcttttttaaagacagggtcacactagtgttgtcctggatggtctggaactagctatgtaaaccaagcaggcgatgatctcaaagatcttcctgcttctgccttctgagtgccggaagttagcttgctaccaacctagactgaaaataagatttttagaggaataatttggggctaggtttgtgcgaaaaaagggttggggatacatgttcagtaaagtaatgatgcttctctttaccacagaaatgtcactgatttaacgcgagatggactcttccttgtggcagtctgggattgttggttcacagggaattagatcatgtgcttttggaaatgctctggagccgtgtgctgtaaacgaacatcgtttatctaaggcaataactgactggagttgattcagcagtcaaatgaggtcatgcgctctaattagcactactaattattcatccaattcaggctgaaacctgtggctgcccatcaataccccttagtggagccttctttcctgtaaaataatctacctcattaaatggttaggcactgtcctcttagccatatacttgctttgcttgttttaattaaaatggaaaaaaaatgatttcttagctattaaacctgtattttaagtcccaggacagctttccaaatagctctcctgcctcatatttagaagtcctgttagttatttgcttatttattaggtctaaatggaatctcctgcctcgtatttaacagccctgatattttttatctgtcctatttatttagtgaacaaagagaagtctttacacaggttcccaagtgctggggctgttggtatgtgccaaggatctttcctgataccacattcctcttttcttcactgagagagccagaacttttttgtagcaatgatatctgatagaactttttacagtgacagaaaattctaaatttgcagggatcagaatcttggctgatggacaccttcggcaactgagtacttaaaatataatttagctgaagacctgatttctttccttgtcttgacctgaataattgtattgaaaagttagttactttgtgcgacttggtgctcccagagtgcacagcagggatgtctacctgctgactttgtactcttctgtaagctgccgtttgaaccacactgctggtgaggttggattttgcaagatcatcttttatcttcatttttaaaaattgatggtatagatatttatttatgcatgcatacagcatgaacatcctgtgtgtgccctgtgccggggagtgaacccagtgtccagtcatattaagcacatgctccatcactggtctgtaccttaggaaagactcttgagccatgaacttgctacccaaggctctaccaacggacaaaaaagatcctaaatctgtaatggccatgcaacctgagtgcacctttacgcgaatgtcccaaacacagcaaaactcacttacaaaacacttacttagttctgaaagtcttctcaggcaagcttgaatttaattgacacaacagagaccagaaacatgttcatcatgccggactgctttacagggaaatgacccttctcatgtagaaaatactggatccagatcctgtgaaaagttagattttcaaactctgaagggaaaaaaatggtttatcttattataagttcgtgatttaaaaaaggattgatattttttgaaacttgtttcttgggtattctaagtttctggactaatatccacttatcagtgagtgcatattaatatctgagtagtactccattgtgtaaatgtaccacattttctgtatccattcctctgctgaggggcatctgggttctttccagcttctggttattataaataaggctactatgaacatagtggagcatgtgtcgttcttaccggttggaacatcttctggatatatgcccaggagaggtattgcgggatcctccagtagtactatgtccaattttctgaggaatcgccagacatgaatctcaagaagaatgaagaccaaagtgtggtcactttgccccttcttagaattgggaacaaaacacccatggaaggagttacagagacaaagtttggagctaagatgaaaggatggaccatccagagactgccgcacccagggacctatcccataatcagcctccaaatgctgacaccattgcatacactagcaagattttgctgaaaggaccctgatatatctgtctcttgtgagactatgccggtgcctggcaaacagaagtgtatgctcacagtcagctattggatggaacacagggcccccaatggagaagctagagaaaatacccaaggagttaaaggggtctgcaaccctataggtggaacaacaatatgaactaaccagtacccccagagctcgtgtctctagctgcatatatagcagaagatagcgtagttggccatcattgggaagagaggccccttggtcttgcaaactttatatgcctcagtacaggggaactccagggcctagaagtgggagtgggtggctgggggagtgggtgggaggatatggggggcttttgggataacatttgaaatataaatgaagaaaatacctaattaaaaaaaaaggattgatagtacaaatgaagaacagggcaaatgcaagcgcatcatctacaaatgatagatattcgcatagcaacctaactgcaaagaggagcctttgcctccttttgattcggagacttcatgtccagatctcagtgggttcacaggttctcaccttcttttttttgaatttcagaatctcctgtaaaaacacagatcgaaagtaagacgggctgctgtctgctaccctgcaaccatgagcagcaatgcaacagacctcaccaccggctacctctcctctgctgcggcaatcctcctgtttggctccaactttgtaccacttaaaaaatatgacactggcgatggtaattggttttttattgttaacctaagcttgcttttaagtgtcttggttatttgctttgtttttgttttatctttttaaaataacggcttttaaaaaattacattttattgctcataaggcctagtgactagaactcacataaatcgtctcacagtgccccttgtggcgcactgagggtgagtcaggacaggaaggacagatggtgctttgtagcaaagccacggtgggtaccactggaaaagctgcttgactgtgtctgctgtgtttataaaataggtaagttatggccagttccactatcagcattcatttgaaaaccaataacgacccacctgataagggagacaccaagctgagcatataacacaaacctgtttactagtgaacaagctcttctctaacaaatcctgaggcaaacgcagaacgctgctctcagttaaagaaagatgtgcggcaggactgtcacctaggcatgcgcacatgcatccctctccacagagctgtgcaccaggcctcctcagtttaccacatgtgcacacacaggcatacctccttgccaggcaacaatataccatgctttttcagttcaccgcatgcgatcccaagtttaccgtatttgctatacctcatgttcactgacatctgatgtcagacccctattcctacagccctgcaataatccataggcagtggtctctacacataaacctccactccttttcaaacgaaagggctaggtttaatatattgttaccacacttaaccgtttaatcggttaaaactgctgtttctattaattcctgttttgcttttatgttttttgttttttaaatgcattgctggttcagtttgtcactgtctttctccaaaccagatctggttctgttttgagttttttactgcatagttttgctcagcaccatagttctagaaatgcacatgccacaatgcagcaaacgagtgcaaggtgatgtttagtgaaggaaagcaggggtcccccttgcctgcccgatgcccttcctttggaagcaagaagggagcagagacatccagtgaccacccacaggaaggtaacatcccagttatttttaaatctccctagttccttagtcttcatactgcttagacaaaaggattacaaatcctttctcccagccttttcttttagatgttgacaggaaggaaaaaaaaaaaactagtagaaaactaaccaaaatgggcagctgacctagcttttgggtttttgatcctagacaagggtcccatgtgatgtggtaaatattatttgaggggggggcggcattaccccactttgaccatatagttcccaaataaaagatacaaaagcctttatatttataataagtcttatagcattagagctaagtagatattaactctctatgctattttgtctacttctctgtcaataaccccaagatatcacttgccatgttcctcctgggccactcctactccaccctcataaccagccctcatgaccagtgctcgggatccacctaccccactgcgaccatttccttcttcctcctccctcactcttcctatggtcccagtctgagaccccccccaagcccaggacctccagccccatctacctctcttctgtccagctatagctataggcatctctattaaccaatcagggataaggggggcaaggcttacagaacaaaagctggtatacgtgagaatctgcatgtttgctggttttggagtacagaatttagcctttggacacaggcagcaccagaccaccctctacacccatgtgtgtgtgtgtctgtctgtctgtgtctgtctgtgtgtgtttgtttctggaagctgggaaggccttgtcacatagtagaacgctctagtctgagccaccaccaacccagcaagtcttaccagttttttgtttttagtttctcacttgtagcataaagttccctttccactccaacactgcttgtttcaaatcttggaggttagcagacatttgttcccctctactcttctctgttgtgagaatgaacagaaatagacaaaagctttgcaagttgcaagcaaaaatggcagcgtagaatgacagcttctttggtacttcatttggtgtggaatatctatctttgcaatccctgagaccttgatggtacaggagtcttgaatggtcactgccatgttcatctcctgggcaatatccagtgactccttatctcacgaaaagcagaggtgtgccagcctagaaggttaagtctcaggcctgtaaaatctaaaatccatctcatcccgggaattaaactccaattgtgtgagccacgaacgccaagtgtatcacaaggtttaagtcactgctgcactgttgggaagttcttggtgccatgttttgatggttgcagtgagactggcatcagagtggaaatataggctcgctcttcccaaaattctttaacagacatttcttggtttgactacaaagtaagagagcagcgtgttaagcaggaatacactggggacttcagtgtcaagcatctaggctttacggtccagttagaaatgtacctaccagatttttgaccagatttgtttccttggtgtctgagattaggcccaccatgacataaagtagctgtaagaataaatataccacatgcccactatatggcgacatgttgtgatttgtgtctgtctctctaagaacatcttgcagatattcttaaacatgcatagactccaatctttctgccaagtaatgcccggttgtcttatttgtagggatgttccttcagtgggtgctctgtgctgccatttggttggttgccttggtggtcaacttgatactgcactgccctaaattctggccgtttgcgatgcttggcggctgcatttgggcaacaggtaatgtgcatattcatcttatacatgggtcacacagtcatattcacaaccaggagacaaggcacagtgggctcagagtcattaggtagacacgacaggcatgagctttgtattgttttctttccatacattgggaaatttcttgatttcttttcccttcaaatgttttaggttcctgctagaaaattattagagtaaaagatatttgatcctttaaacacataactcaaatgccattgcacacatttgacctttctccagcatgtttgtcagaaaatgtttattacagagctaccctttgttagcatcatttgtgagcttatccttaaaagctggcgaatagcagcgtgtaatcattttgggtaacatttagcaaagaaaagagaattaaaaatctcttcattgccaggcagcggtggcgcacgcctttaattccagcactttggaagcagaggcaggcagatttctgaattcgaggctagcctggtccactgagtgagttctaggacagccagggctacacagagaaaccgtgtcttgaaaaaaccaaacaaacagacagatagaaaaaaaaaaaaaaaaaaaaaaaccctcttaattgctttatcaatgccttaacaagtatcatagaatctacatttccaggtagccattcagaaacgtctcctctctatgaattcaacctgtaaagtcctctcttatttatttattttttaacaaagagaattaccgaaaatccttaagagagaaaattattagatgcaaataaaatttaaaacgttaaaatgctactgcttacccacttgagtctttgagggattgaatgagtgaatgaaattctttagtcagagaccaagataagccagcttccccttcccaccagagtctgcattacggcgcctcacatacgtgtgtctcacatacgtgtgtctcacatacgtgtgtctcacatacgtgtgtctcacatacgtgtgtctcacatacgtgtgtctctgcgactgtttgctgagtggaactgggagagggggaacagccttcctttgttcccttggcttctggaggcaacagtctgtccatgcagcccaaggctagcctagaactcagtcctcctgcctctgctgcctgatgtcactgcagacatctctcctttatttgtcagcctgcactttgttgtttgtttgtttgtttgtttgtttgtttttggtcaaggctagtgcataaatgtggaatacttcatgaatatcttcatcctctttgtgcagaggtcatgctaaccttatttgtatcactccaatttgaatatgtgcacttccaaagtgagcattttttttaatttttgaaatatgcatttatttacttatttattcaagatagaggtatcactgtgtagccttggatgacctggaggactatgtagaccaggctgatctttatctcacaaacaggttccactgtgctcagagtggataagtagggagccaaacttgagaaatataagcacattataggttataacaactaaccggtcgggcgcacagaggagctggtggtgtaaggacttggttgcaggtgattagaagggagactaacactttgtatcagaagaccttttccagatgggaaaataagtggagcatggtagcctctgagtctaaagcccaagcattgccacaggggacgacactagctgcaggctgcttcagcagttcagagcagaacactgagactcaagacagtctacactggagctgtgttaacagggtacatggacctctggtcaatggctcaaatcaggagagaaggtgactcacaaacgtaaagaggaaacctgggaaagggaactgcaggactgagttgttgcagagagggtaggaagtgttttacagaaagcagcagtgagctgagtatggtggaacacccgttgtcccagctactgggaacagtgagataaggcttattgagtcctaaaatgggagaccagcctgtgagacattgcaagaccttgtgtccataacgactatgctagtgacaacatgcaacaccatcagggatttggccctgggaaccctcaagagcgtaaggcaatggttgtgagaatcttagaaggaaagccagtgagtattagaggatgcattctagagttgtgttgaggcagaagttaaattcaggaaaaatggtaatttaactaagaaatgcgtttgttgtgtgggaagtcatccatttttccttcatgttgtatctacaggcaacattgctgtcgttccaattatcaaaaccatcggtttaggacttggaatcctaatctggggatcatttaacaccttaactggctgggcaagctcaaggtaacacagtccacactatctcagctacgagtcctgcaccctgcatttggtgtaaactgggatctagccatattgggagaaataacatgattcttggtctcagattatggctggtacatgtaaatgaaccatgtctattatttgtctgaagctcttcataagtgatggagatattttatgaagatatagtaaaggaaataaaaagtaaaagctgtatctgggagacaagtggggagaaaggcagctcatgtctgctttctccctctactgcctaaccaggtacctaaagtagatgctcgacaatctgtggctcgatctccctgggattttgtaagatttagtgagatgtagctatgtcaaaacacttaaggagcctggcaaggtggcacacacctttaattccagcacgtggaaggcagaaccaggtggatctctgaattccatgctagcctggtctacaaagtgatgagttctaccacagccagggctacacagagaaactccatcttgggggagggggtgctggggagggcagtaactgtcattgtctatggctgctttcacataaaatggcacagagaaggggctacagctagccacacctaaaacattctggcttttaaaggagaacttcttcaaggctagctagaagttgtgttgtccaaaaggttagccacaagccacaggtagctgttgtatggaaacttaagctaattaaaatcaaaacatttgagccttctaggtcgcagtggtattagctccatttgcagaggcttccccattccacacagggcagggatggggacatgcgtgtgaagctccatcaacagtgtgtggtgcccatggtcggtttgcttcaggctgggctcggggaaatgagaagagagaacattactcttgcctcactttcccttccactcaaaagcattataaccaccccaaagaacaaagccagtcagtctgccagcttactgtgtgtacatctttccctgtcctttctctcccagtgccctggagttttgtttgtttcgatggaatgctcactctcttacccttgggtggctctccatgaagagtgctaatggttgtgacaaagtcaaaccatgatgaaaagaagagattgtaaactaatgtcgaagagtaggaatttttagccaaaaagtcatttgaaatacctcaaagattatagaagggcttgagatagagcttagtgttcgagtattgtctagcatgtgcagggccatgagtctgattcccagcgttgggatacatgtatgtgtgtgttttcccatggttgttttttggtttggattgagtttgattgtattgggttaggctggactgggttgggttgggttgggttaggtttgggtttggtttattgttttctgttgttttgtttcgtttttggaataagacctcactatgtagccctggctggcctggaaatcaatatatgaccaggacggccccaaactcacagagatccaccagcttctgccacccaagtactgtagcccagtctggccttgaattcttcctgccttacctctggggattgcaggaatataccaccagtgcctcaactgctcttttctctactttaacataaaaattaaaggcacagtatggaaagtagtttatccaaagtcagtacatgagagaaccaagatttaaactcaaagagtccagcccctagtcctagtcctagcatgactgtaaaacattttagcagtatctgatctgatattcttctggatttccaggtttggctggtttgggatggatgcagaagaagtgtccaagccaatgctgaattacgttggagctgggctgtcagtagtaaggtctacagaggtttctagtccctaatattttggggcattctgagtgttttctaaagatttgttttatctttcatctatgtgtatgtatgttctgcctgcatgtatgtacaccatgtctgtgcctatcagagaagagtgcccaattccctgaaactcgagtgacagatggttgtggactgaaaggtggatgcttagaataaaaccctcatcaaaagcagccagtgctcttatccactgagctatctctccagtcccactttctaaagcttttaatatccttacattttctttaaacctacatttcataaagtttatgtttcctgatccttaattttcaatgacagaccttatttccagcacacaaaacaccagataaggggggtcaggaaccctagttttagttctcaaaagctctgagaaactcggaaaaagtcacaaaactgctctgaagttattttaatatctatactagatagaaaaatcacaatacattgcccatgaataagaaccaggatgtactggatcattttgcttatcaaagtatgctattcaagtcaatattctgctggtttcctctatgcaaccggaatggtcgcttattatatttagtccagtagttcttgctcatccaagaggatgtaccaaccctcagaggattcctaaaacatagaatgtagcaaaaactatgactttttccattttaactaagcactaaggccatgcttgtatagttctatggtttccataagacaaaaaagctaggaaaaatatctatgtcttaaaactctatgagttagctttgttcttactacaggtcttagagcctttagtgcagttcttttttctcttttgttttgtaagctaggaattttttttatttaccttctcactggaaggtaactctgaatgggtcctctttggcacattggttctgccagcttgcttcaccactcttgtgatttgtgctcatggtagctgaattcagcactgcaaatcaccatagtgggtttgactaaggggacttcaagtcctgggtagttcttcaaggcggctacctgggtaaagggatgccaatgcatgcctggggcctcagacaaagagacagcaccgtgctatgcgaggcggtgcacaaggtagggatgtgtatgccttgcatttaacatgtctgattgtggctgactataagtaaggggagccttgctgagtactgataccagcctctaccaccccactctcccattccttcttcttaacccagttacagctctctcacctctcatattctctcttgaataccaagttttccatgactcctcctctacttgtgtatactatatcgctaggaatgaaaatgactttgaatctctacacagtggagttttgccaataaaactcaagcaagaattgggtcaccttaaattcagtcaccttttctctctgggttccatttatatctgctgctgtcactgctgcacatactgaatagcactgctctcaaagactttagtactttttcgctcttctgggaaagaacagtatatcttccttcctccagtaacggtgtttttccccagtcacattcaggaacaatctctttgtcattgaaatgttgccttagagagtagtccctaggcaattgggaacgaatagcaaagcttattctaaaactgtaaattcttgacacatttggttagaggcagttttatgtgttctgtacagttcactcggaattctagctttcggtagttctaagacaatttcttcacattgtaaaattctaatttagcatgtctagttttaacttaatggtaataatttaatgttggtccatccagtacattaggcacctttctcctccaaatgtcttctttaaaaacacaaaaaatttccctaaaattacaaatcggttagtttctcctgctctgacacttccacccagaagaccttgcacagatctcttctccaagtcctttgttttggcatccataaagaggaggtaatgctagcaccaatcctttaagataatttgaaaagtaaacgttgtgagagctttgtgtacctagacacatggtgaaggctcagtatataagttagcttccatcagtactcactatctgttctgtagtaaacactaaatcatcaatgtaagtgaaaaggccattacaaatcagtcccattgttgaggctggagacgttgcacaataggaccacagtgtatggaggagcaaagctatctaccagaggacaacagaagtgaaagacggggaacctccatgagcccctttaaagacctgcccctaacaccgaacttctgattaagctccatctctgaaaggctgaccacctccccacagcaagtagaccagacaccatttgacatagctttttagggacacttagaacccaaatacctctactattatattcatgcatagttgccccttggggcatttgttggtgtctcaatgttaattgggtaatgaactggagggactctgcagctctgtcaagagctgggtctgcagcaggaggatgcaaggatctcttcctgtgaggcatccaggccccatctctattgctctcctgggtggaactgcaccaatctgttatttaattagtttaacttaatggctttaataggttcattttgaagggcattggctgagtgaatttagagctcatggtagtgtgaagaaacaaaatatagtttcattggttacagagtggctttgttctctctctctctctctctctctctctctctctgtgtgtgtgtgtgtgtgtgtgtgggtgtgtgtgtgtgtgtgtgtgtgtgtgtgtgtgtgtgtgtgtgtcagcatgtatgcatttgggtgcacaggtgtcatggcacatgtgtggaggtcagagaacaacctcgactactgatttccatctttttgatataggccctcattggtgctacatacatcaggccaattgacctgcaaggtcccaggcccccttctgtcccagtgtcccatccttctgcaggggtgttaggactccatactctctcattgcctgtgttccttctcacatcagttctgaggattctgacgcaggcacacactttgcccactggaccatctcctcagctcagatgttacttttcttttcataattaagacaatcatttcagttcactgtgcagtccagtctttaaagaactggtggcacaattcctagttttacattttccctgtataacatatgctactctgtttatataacaggaaccactctaggactttgaatcaacagaggatctatttgcttgcctgcctgcctgcctgcctgcctgcctgtctgctttcttgtctgcctgcctacttgcttgctttcctgcctgcctgcctgcctgcctgcctgctatcctatctgcctgatgtgccatggattatccaagcatctgttctgtttctgtccctttcaccttctctctctggagtgttgtttttttacccaaccttggcctttattctgcattgtgaggaagagcaagcctttgtttctagctttgtctttcacagagttgcagtctttttgtctaactatagaccaggctggacggccctactaaaatgccacaataactcctggtccatccatgtgagatgacaaaccaaaggcaaaattctaattagaaaaacacaaccacccttaatgttctcctttacaacgcaaaatgtgtgctgcatttcatctcctaaatccactctttctgtcattttgttttgaagacaaggtctcactatatagctcatgttgccctagaatgcaaagcccagactggcactgaactatggtcctcctctgttggtctctcaagtgctaggatctcaggtacttctgggttaggagacatcaccttcctaatttctcctccagaaagactgtcctttaatcaggaatgtgactgtcatgtggaggtggccatctcttacagctgtccaacaggatattgttaaatgtttggcggttgccattatgatatataagggatgcttttggggttgtgttcactttcatttccacgtggtgcaatgtaaagtcatccaacctaggggaagtcccttgtgcttgttctttaccctgctgaagaaaggacaccaaggagaatggggagttgaagagacagcaagcccccacacacacacgggggcgggggggagggtgtagaagtaattccattatcaggactccatttaagttctgttttcccttgaaaatttggtagctagataccccgaacaaaacacagcaatcatgtcccggtcaatctcactggaatgtatttccctacagtgcgctcacgtttttgttcatcaaaagtgaaattccgaataacccaggcagctcggacaccacaccactgatgacagagcctgtgagtatcgccatgattctgccccttcccctctcttctatgaactgagctggctgatagcttcattaaattgacctaaaaagagagaagagggatattgattcctgggcatctttaaggactgtgtgcttcaagaaaagataatttgtccctgagaggaagctcttgaccttcttacgtgatccagggatctagacgatgctaaccaggctttgaatgaaggaggatcacagtcaataacagaaatgttaaatgttcttcaagtttgtcttccagactttcctcaacttaaagtattagcctaactttaagacatggctggaagtattttaattcagtaaaacaataaacaaataaataaataaataatgttattgagagaaaatagacattaaaatgtttattgatttcatgcattccactgtagaaaatctgtgtttttcttgggtctaatttctttacagtttattaaaatacactagtgaaccatgaaatctaaatttttatcaaatagctacacattaatctgtggaaaatgttttgaaaactggaggggtggagttagaccagcggctctgaactcccagagcttgtaggtgatttgtgcttctgctaaggcatgtttgagatgggggaagccctggaagcctttgtgtggcactgaaatggtccgctgaaggtccttgcatgccggtctctctgatgacttccacaggtgatcaacagaaccgaggaccggagtgcggattcctcctgggtggatagactttctaccacgtaccaccgcattgtgtaaggcgaggcagcttctctctcctgttgtgttttgtgttttctaaaacagagggcccagagagatgtggtgagattcatctgatcgcaggaagaaaatgatcgcgaaaacttgcacttccacctcctagggggcagggttctctacactctggtgagatttcagtatagaagatgcctggaggcatactgtacctgaccagttagccagtgacaacagcgattgtgttttgtaggactttagtatcaaaagtatagtggttgcataatgaccgtgtagtgagcatcacagtctaatcaaatagtgtgctccacttggtcagcagagggctgccacccttctttcccttgtgactgttttatgatcccaggtatctgttttcaaatataatagaacattgtgtccctaaccccatgtcttcctcgtaagcacttcagagatgccttaaagcagcctatcactctttggagtacaggagtttagtggtttggttttttaacttattttttgtttgttttttatttttcccccagagagccaaactatttaaaacacactatagtacacagctttgattctcgtgttctttaaatatccttaaataaaattattaaagttgacaaggaatttgttcttaggcttaggggagtttttcaattatcttattgttttggttttggtttgcttgtttttcaacagaatcttggtatgcattccataccggttcaactgtacagccctccactctctgacattacagcgttttggcacgagcctttgaagacaggggtcttgtctaaaatagcttccctcttttaaatgcttgtttgtatgaagataaaaggactatccatcttcttcctcaaccccgccttgccacgaatgccagctcctgttctatgcatgcagggcccaaggccaaggagttgacagtgtttgaaataaaacattacttcttttcataaaggaattgtttatacctaaaatatccagattcttagtcaatgaacacttctcgacacgaccataatcagttctgtctctgcagccattctaaacagaaatgcatttgtccatagtctgtgctggttccgtgaggaccctggaacatgtgtctgaggggaacttgaacgaaatgtccatccacagttgcctcacacctccgtttatttatggtgtatgacgctcagtggcaatgctctcaggtggccttcactccctctgcatatcatgtccttccaccatgacacagcagacggctgaggctacgcctctctcctcgtgactcacagagtccaaggcagaggtctggcttctgctaaactgctaaaaatttgaagaaagccttacttgtgtttccatttgtgtgtcagaaacatttcctctggccaagatacacagtggttttcttgttgtttcttaaggggctgcagccttgcggtaatatctggaatactctacggatcgacatttgtgccaatcatttacatcaaggatcacagcagaagaaatgacagcatgtacgcaggcgctagccagtatggtgagtgaagagccttcctactgatactctattaatagaaaaaggagctgtggtcgtcagcactgctgtgtgcatttgtcttttcatttgtaagcgctgaatcaggaggcaccaggaataaaggtagcagtgggcactgaaatgttttcatgggatctgtaacacacaaatggattcaactatggtcaggattcacttccactgctgggatctcagcaaggggttctcagctttccactaagatcgagagattgtgaagagccatttatgtctaatatcatgacctctgagaacatatgtgtgatgatatgtgttctgtgcttttaaaaagttaaagtatagcacacagtattcttttttccccagtaattttaattcaaggaatgtttctacagaaagactcatatattttcatgaaaaggaaaggcaggaatgttcattgtgacattattcacagccatataaaactgaaaataggttaaatgtccgtgaatgaaggatcatttgaaacagctaagatatttgcgcatggcagggtatcatgccattattcaaagtttggcaggtgcatatgtatcaacaggctctccatgatgcatagcacacagtattcttagaccaagtaaatttccaaagtatattagaggatagtctttttcaagcacaaagtggtccatctaaaagggtcggcataatgcctccagttctaaaatcagtatctaggagcaaagtgaactttctgtgcaacgaccctgggccagctgaaagggaggtgagaggatcctctggtgggagtcttagaactgcacggaagcacggcagacttaaggaagcaaggagaaagggaagttctggtcatgtgatgtagaaaaatcaatgtgactggttacatagataagagagaaatgtgaaatgtagaactaagtatcgaataagacaggaaagtcacaagctcaaggccagttgagtccccacagggagaacttgagttatcatggaggtttgaacttgaccgatgaccttgaggctgctggctcctttcctccttcctgtacttgaaccatgagcagtactagaaccttctcctgacctcatttactttaaggttttatgtaaattcttttttagatttgggttttttccccctttttaaaagataattactaaaggaaaatttaatcaaaggaaggagaaaaaataaaaaataggaaaaaaacagagccaaaagtgcgtttgacatctttgtggaacacttgtacacttgcttgaaataagccatgaattcggttctcatggccacaagggaaattaattcagtcccagaagtcagtaaacacagataaaaacaattgactgttcaggaagaaagcccctcctggtcctgggacataataaacaatgccctcaactgtcttttactgtcaacagacaatgagattttaggtgttgttcttacaactctgactgtctgatgagagcaaactttattccagtttgttaaaacagttatcctcagcgggccattactctgttctgtttaacagcacatctgtatcttgtgctctgttggaaggtctgctgcagaaaccaactagttagccctaatgccacagacaccattgctattgccatttcacggctgaaaacgattacgtcagagagctattaggcaggtctctcgagtccctcatcagtgaggaaggactcgcctttgtggtctgtgcttttacagcaccattatgacatccttttgtggatagatggatggatttcatctctacaatctacaatgtgatttcgggtttagaagaagatataggcatgcagttcaagtcttcatccaggagcacaccgcttatccctgtcaaaactgtaggtagattcctagccaagctcctgcggcgcacccatctgggtggcacagtgccatctgctcaggctgtcagtgacattagggtccccgggatgggccaccatgtgtatcactaccctttcctgctttacagctagtttgttgtaaacagttagacaaagctgtctttggaataacttccaatactttgtgacctccagcacggctgtcatctgcaaacagaagtgctgatctctgagtggatcaacagaccttggagtttggggacacacaagtgcccatttttaatccacattctcccctctggtctacatcaagatatactacagttgctgaggcctatagtagaaatagggctggatgcctattccttcttaaaaggcaacttgacatcgtagtcggacactgttcactgtttcttactgggatttccagagttataggaaaaacagcctgatagattctctctgtagttaacttacttcacatttctagattttaaatccatttattaaaattcgaaacaaagagcacattggagatttagaataattaggtataatgaatgttcctgagaatttaaggtcagtttctgtgagtttgttttatgttcagaaattaacaactgctgaggtggctaaaatgatgcttgcatttcgtcatccacgtttgcagatttagactacgtgttcgcacactccagtggcatctttcttacaagtacagtctactttgtggcctactgtgtagccatgaaaaataggccaaagctgtatccagaggcagtcttaccaggtaagaaagaatattaattacaaaaccttattattctgtgtaagtgccagtcccactaaatgaacctgaataatcattagagagcaggaaaggggaagaaagagaagatctcagagatgggaagagagagagggagagagagagagctagttctcttaagtgttagttcaccataaaatatgaagcactgaaaaatagatagatagatagatagatagatagatagatagatagagtaggtagatagatagatagatagatagagagagtagagagagagagagagagagagagagagataagaaactatatacaagatgttatgttagtctagagcctaaattgccaaaacattaattttgctgtttcttgtgttaaaggctcttctattcgggtcatcagccttcactattttttatccaccattttaagattagcattgcaaatcagctcctcttgcctgtatttacaataaaagaagtatcaacagataagagtctgaagtcacttagaaaagtagtttatccagaaagttcaaaaggaaaaaaagaaaaaagattctggagtgttaatagaaagtgtgttttgggtcataatcctttagtcattgactgttataataacagtttctcactaaagagttcagcatgattcaatatggagtgtgtatccacaagtaaatattcttacataaactaaagcacctgattctttttgagtgtctggttgattagtagagtagttattgaacacctggctagcacattgcagattgcttggctagggtcttctcttacaggatgggattctatccgcctccagctcagcatcagtcccaagctcactccacagggtgtgtcagatcctgtaccctctgggtccctcccccttcctcagtccctacctcagctcttccttaatatccacgaagggaataactcagcatcttcctcacagaatcctggagcagaggaatcaatcgctcgccttcatttgttgttgtttttcaagaccaggtttctctgtgtagccctggctatcctggaacccactgtgtagaccaggctggcctcgaactcagaaatccgcctgcctctgcctcccaagtgctgggattaaaggcgtgcgccaccatgcctggcatcgctcgccttctaaaagcaaccagaaagcatagctcagaactccagaggggccagtgttgtttataagaatacttctatccgtgctttcacagcccctggtgtaggaggtgtaggagcccgcggcagaggaccgcctgcctcccgcatgtgcttccttgtgttccaggcttgctgtcaggggtgctgtgggccatcgccacctgctgctggttcatcgccaaccactcactaagcgccgtgatcagcttcccgatcatcactgctgtaagtggccggtttcctgggttgttttgacactaaaaatagacaatctgccagtctcgagtcgccacatgcttggttactaaggagcaaacgtttataacctctttttaacaagtttgcaaatatccaattttctacatccctgaatgtggcttccttcggtcattttacctaatgacatctgggatatgttataattttctattcataactctctcaggctcatttgtgtgacactgtagaaatataatgtgagacgaagagttctttaaactcctcttggcactctgtatgcgtccctgggttgaggaagtttttaaaaattatgatgacattaaccatagggactgttgtctgctcccgtgggtttggagggcttaattatgtgaaacataggtaacagcaaaacccaaaatgcttattttgacaaaacctaagtcatgctaaagtcatctccactttgaagatgaagaagttgaggcaccagcaagagtgctgcctgaatcacagaactggtggaaaccagaactcctgagaacagttcccacagctcctgtgggcctctggctcatcatcaccttagacagtcttcagccttctctctatagctatatataaaaataaagccatgtaagccagcaatgggagtccctggtggtaatgacaagagagaaaaaagtataatatatgtatgtgtatatatgtgtgtgtgtgtgtgtgtgtgtgtgtatgtatgtataatgtgtgtatatacatgtgtgtatatatgtatatatatagtgtatgtatatatacataagtattacatatatatacttatatacactatatatagtatataagtgggtattttctttaaggatcttatcgttattatttttaacatgtgtatgcagtgtgtgcctgtgtgtggtgtgtgtgggcatgtgtacctgagtacagatccccctggagttagagtagttgcaggcagttgtgagctatgtaacatagccgttgggaacagagcttgggttctcagcaagagcagtcatgatgggcccttacctgttgagcctccaccccagtgatccgctcttctgacgagctgttctcctgattcctaaataatcaacccagacattccttccttaagtcattttagtaacacgcttgtgtaaactgaaaaaaatttaaccttgactagtttaaaacagatttcataaaggcttggtgtgggtttcaaacagtatttgtctgtttccaagacggtgtctttgtagcccaagctggcctcaagtttaaaaccctcctgcattagcctccagaatgtcagaaatcacaatcatgtctcaccaagtctggctcacacagtgttctttggattgctctgtatttatcaaataacctgcaaacaaaactaagttcaaataaaatctaagtggtatttttgtttagacagcctgcatgttggcatgagaaggaagtgcctaagtctgcaagtctcaatcgagtttttattagatccaaaatctttatttttccctttttttgggggggggggtgtgggaggttctgagacagagtttcactgtgtagtcatggctttcctggaactcactctgtataccaggctggcctcaaactcggaaatccacctgcctctggctcccaaatgctgagattaaaggcgtgcgccaccactgcccggctagatccaaattctttatgaaaggaaggagagggaggaggaggaaggaagaccccattccccagtgcgtggacccccactctctgtttcctttctgctctggcaattctaaaactaaatacatcatttagaaggcttcgttctcattaatagtgtctatgcaccaagcatcatgctaagttttaggcttggctgcctgagacagaaccaaacccacctttcctttcacttagatgtcaatgtgtattattttacaaaaagaaaatacacagttcacgcatcccaagcaattgcagctactgtgaaatggcctctctctctctctgtgtgtgtgtgtgtgtgtctgtgtgtgtgtgtgtgtctgtgtgtgtgtgtgtctgtgtctctctgtgtctctctgtctctgtctgtctctgtctctctctctgtctctctctctgtctctctctctgtctctgtctctctctgtctctctctctctgtgtgtctctctgtctctgtctctgtctctctctctgtgtctctctgtgtctctctctgtctctctctctgtctctctctgtctctctgtctctgtctgtctctctctgtctgtctctctctctgtctctctctctgtctctctgtctctctctctctgtctctctctctctctgtctctctctctctgtctctctctctctctctctctctctccagggctctcctttgcctgggctatacattacattagcacagtatcacttcctgaaaccacatatatcttcacagccatgctcagagcatgggtaaagggcaattttaaacatcatcaggtaggatgcttcagaggccagggcaccctatggtcctttcttctctggagagaattgcgttttcagaatgaagaggataaagatccctgagcagccagtgtaatattgatgtttcggcccgcccttacaaggcacatgcttctcattggagttggattcctgagacaagcactttgcaaatctgatgtaaggcgcttcctttgacctatttttctgccccctttgatgctgacttcgcagatggtgataagtggagaacaggacatttttattgcttcccttccgtgctagaagcagcggaatcaaactttattgggccagccctgttagacagtgggagtggtgtgggagagagaacattgtggaattgtttattgaagctcttccagagtccctgcagcgcttgaagaggagtcattaaaattctgctctcgtaggtctcgtcttcaccgacatcgcagctaagccaactccactgttttccttgctggtgaaaaacattccttccagacctgaacagcttcatgttttcaaactgtagaaatgtgcattttcttgtttcttcccatttcccattctgtatacttttaactcttatccttgcctccaggagctcccattgcttgcttacatggatatatatatatctccatccatacatggatacacacatacacacacacacacacacatatatgtatgcatctctttagcgttacttcaggtttagtgttagacaaagttgattggtccacatggtggcctggtactgccattgtctatcaaagatgcccttgcttcatttaggagatcagatcatgtagctaatgctgagaaagataatgtgtagtcatacgcttgattttatgaatctttttatgtgtgtctaagaagtacatcaagagacaaacaagctatttgtttattttaaaagaggaaggttgggttgtttgtggttcagttggttggttggtttttgtatttaggtttaaaaccaggacttcccacacaggagggaagcacagtgccactgaggcatagcccctcccttttccaatattactctgcctttttagacaggttagccaggctggctttgaactcagtctttaaccctgcaagccatcaatttttagttctcctgccttagcttctcaggtatccaggactacacacccacactacaagacctgactaaagtagtttattgtaagcatattgcactaaagaaaattgtttaatgtgataaaatattacagcatcaccaaaataatagcaataatgaccatgaagacaaaaaatagcaagaaaaagaaagaaagaaagaataagaaagaaagagagaaagaaagaaagaaagaaagaaaagaaagaaagaaagaaagaaagaaagaaagaaagacaaagaaagaaagatagagagaaagagagagggaggagggagggagggagggaggaaggaagaaggaaggaaggaaggaaggaaggaaggaaggaaggaagaaatctgtcttatttaaagatgttactttgattttttggatgaacgtggaactatagtttagattatagggttgcctacccaaaaaaattatgttgcttatagcttactgtatttttctaggatgcagttatattttttttaaaaatccaataaaattaaagcctttttttttttcaatttaagggtcctggacttattgctgcactttgggggatactcattttcaaggaaatacaggtaaggatgaagaaatgattgctgtccccggatctcagtcttaagaactttggatagatgatatatttcttctttaaacacagttactgagtgccctgttctgaactagtaccagtagctaggttaagacttctgaaagctaaggcaaggattttaggagacctaaagcgctagtgtggaactcacatacatggcaaatgtgtgcaccagaagctgggccccgcctggcagctctgggtgctgcaattccccagtcgagaactggacaccgtctctagtactgaggctcctagcaagtcagacaacttacctggcctagacccagcctacaaagctctgaccaaagacaaattaatgtgctttaacctgattccttattaaattgcaaaaagaatatgtaaaacttaggtcttcgaattacattttaagggtaattactcttagcaatagttttttatttactttttcatttatttatgcacgcatgtgtcagtgtgtaggtatgtgcatgcagtggctagaagagggtaccggctgccctggagctggagctcaggctgttgtaagctgccccatgtgggtgtactgggaactgaattccctgttggaagagcagcacgtcctgttaaccactgaaccatctatccagccccaagtgtgactaatcctgataagagctatgaatttaaaagcagagtcccttagcctctccattctgggtactgtttcttttgtatctgaggttgctgcacaaatttccctctactctgaatttgtcagaaatgaagcccagtgctcctaaggaactgccaggaaaaaatgacaaataaaaagcaggaaaactcagtgtgcagagagagtcctgctgtgtggttaggagagctagcctcatgtacaactgtcagtttggcctcttctgttggactctgattcaggaggcaaccacactagggcactccttctgctcttccctcacagcagacctggccaaagggcggtaaagagggaacccttccctcaactttaactctgacatgatccacccacaccactagatttccactcatgcttcattggccaggcattcctgggggtgatgctgagaaatgcacctctcagctctgctgaggatcacccatgagcagcacccagccttcacagattcactctgcacaataagtcagtcagttctctgcagagacacggcatcccatctccagcctccctccctattagcccctctcttaagtaccttcaggttacctgccctggtgagcccaatttagtcagagttttggtgagaggagggtgaccaccttcactttccctacagatgtgacgaaggctgcatagatattcttatctcccccaccccaatggacctctcagaatccctgtgtgttcacttcatgtccacagttaaatcatatcacttctaaggaaacggccaatagtagcattctatgatttctgtgttagatgatctacaacttaggaagggaaactagttctgttggtaaagtgtttaacttgaagcatggggacctaagtttggtcccaggatgcaagtatggtggtacacattgtaatccaagcactggagaggcaaagaaaggaggtccctgggactcccttgctacccagcctagcctccgtgacaaggccactcaggtggaatccgtatctcgagtcagtgaggcagtattctggttttggagtgtgcagatcttgcctgacagtgttcggagtctacctgtacaaaggcgtgagtgagtaccttacaaaccatcattcagaaagaaacagccaaggcaaagacggtgctgggaaccattctatgtgaaaaatgactgaaggggctaagatattacccaaaagggatgctcagggaccgaggaagttcgtttcttgctgtttgagggtttaatctcaggaggcagctattgaaatcgatctatgtgtacccctgaagatagacatcatggaaatgaaatatgtctgcttacagcgggaaggtatttctttgagactcaggccatgactgtgctgtgtcgggatgaggcaattcatgccttccatctttaacatgagtgcccatgcatagcagcaaaagctagtcttccttgctttagacccacctccatcctaccactggtgtgttccatcttctttctcgaagaaagaaggttgcctccttggtctccttacattgattctggcccctcccatctatttcacattctcaaaaaaaaaaaaaaagtagaatttccagaatgcaaatctaaaatttcagcacctacatcttcctgctcctttaatgccttcttattgcttgaaaagataagacctataggctcttgaatacccaacaggccattcaccccccagccccaccgtcttagttaggatcttatggcagtgaagagacaccatgaccatggccacctttataaaagaaaacacttaactggagctgtgtcatagttcagaggcttagtccattatcagcatggtgagaagcatggtggtatacaagcagccacggtgctggaaaggggctgagagttctgcatctagatctacagggcagcaggaaggagactgccacactggatgtggcttgagcatctgagacctcaagacccgcccacagggacacactgcccccagggagggagagatggagagagggagggagagaggaagggaaggagggagggagacagagacagagacagaccagcacaccaatagccagagcatatgacacagtaaagatccatgacagtcgttttaaaatatacatgttgtaaatttaaatttgattcaagttttattcaatgcagccgttcttttttttaattactcagggtctccgaaactacttactgatgatgctcgctttctgcatcatcttagctggggccttgtgcaccgctttttctaaagtgtagctgttcacggcaagagcagcagagggcagcagagggcagcagcggctaggagaaggacctctgctgcgcaagctaacactacaggcagctaagctgtggcactgtgggtctctgccactctgggaatgaacggataaatggctgttggctccaccaacgtgagaacgcgaagagagaccgtgtttcagttcagcgtgtgtgaaaactcttttcgatgagctattaacgaaggctggacctcgctgggtggctcaaaggcatatcggatcatcctgtctaacaatgtctacttaatactataatccagaaaataggatggagtttgtacaaaagaaattaccatcccaatttataatttattaataaagaggacccaaaataagtactttcttggttgtgggaaggaacacacacataccttgtggaatttacattcaaagatatcggcccctttgctaagagcaaatgtcatagttgcaacctgaatgtttaaaatgccatttcattttttttttggccaaaaattattactttaatactactcggctctttatcttgcctgaccttcttagctcaaaatgtttgataattattccagataaaacggatcctcagagagcaggtcaccaccactcctatgtacgtgtgatataatgtatacattcacaagcacacatacgtgtgtgcatggtttcagatttggacacattctagagttgctgaaatagcagttttagttcatcacgttcaacttaaaggaagccgacttgtttgactgcacaactaattttttcctccttaaacacagttacttaaaagatcattttaactggaagtgtttcttttgaccctattttaactgatttccaggagacaaaagaaggtagcatatatattgatttgattctttaagggaaaaaaaaaaaaaaacacaggcacattgctcacaatcatgctctctgcacccttaatagaataatggtgtttggctgtgcctttcacccattctctcctgatattgcagtactttgttgtgccagagcaacagaatagcatcctgcacctgcctcggcttaaacctcagatgctccgtctgagttgtgcagctttggacctgagagctctctcggcatggcaggcttcctgggaaggagggctagcgatagcatgtgccttgaattctgttgtccaaatgtctccttgcctgacaaacactctaaacttctttgctattgttactacatgttaatcaaggggaaacaacgtttacaggtaggaaaaacttacaacttataaaaactactggacttaccaccctcagcccaattgaactttgtcttgccaaatcagaaacatccctggagtcccttctaatcattgaattgctcacacaaataatgtttgatattaacaatgtcttttttctatttcagtttttacttgaaatgtcattaaattgtgatggtatggcaatttctgaataaacatgacagaaaaactatttcttttcttctttagatatatatttagaatttcatggtgggcagcctttattctttgtgaggtggccaattttaaatgggaagtaaggaaattacagagaaaaaaaaacagtaaaagaaaataaagagcccttaattccaccccaagcaatccaagcaatgcctacaatgttaataaaagtattgtgggagaaacaagcttttccaaaatggttaccaaacaatttactgttcatggttacgttatagggacagatctgagtcctagcacactcaatggcatttgctgggttccttatcttttgatacagggccatgtggttattaggaaaggggagacactctcttcaggctgatgagctgaggggaaggctcaaacagtgctggctagaagctgcaggaccctttctaatcaaggacgtagctccacagttgtaggcagcctagtgaggaagggcttccagtcctctctgtcctggtttctgtgggttcatcttgatgtaggttttagggtctgtctgtctgtctgtttttgcctctcccctcctgcagttttgtaatctcccctctgtccactcatcctcagaggtgagggtttgaggttttcattccccttgtgtggtaaacagagtctgctgttttgatcttttcaagttgtgctttctactgaaccttaatgaaaacggcagccacgtttgtaccagagagttcctgcccccttgtgtccagaggcaaaactgcataaagtgaaaggagccaccccgtaaggctgatcttcacactgtgggacatgcagaacagaaaataaagaatctagggcttagcaatatagcgtttcctttgagctaccaatgggcctttattcctgacttacttcatttagtgtaactggctattatacctgttggtgctaaaagtcacatggagttgaaaaaagtaagctgtacaaccttgtgtatagtttgatacacttgaagaaaattgctagtgatcaaagtgacccacatgtatatttatataaaacattaaaaaccaatgttcaccaggtggtgggggtgcacctctttaatcccagcacttgggaggtagaagcaggcagatctctctgttctgcagagcaagttctaggacaaccagggatatacagagaaaccctgcctcaaaaaacaaaacaaaacaaaaaaacaacaaaaacaatgtgtcagacttatcgagatggcttttgggacctcgaaggagattggcatgttaatgttgggggagagaaaagctgtttgcatcaagcagtcatgaaaacatactcagggtttgttatagatgacacattttcagcatcttttgacacatttataatttttaaaagaactggagcaggagagaccaggacttctcttgagtatagacaatgaagttgagtctttgggttgaaaataagcaaagaggaaaacagctctgggtgtcctagcagcgtaagtccgtcgcgtgcaaggttactgtgaacattctcagaactctaaagtgaccgaggggcgggtgtgaacagtcagcccacttacactcctgctacatctccagcacatctcatttaaatctagcgcatgggcagttacagctctctgtaagaacccttggacaaggcagaacactgggaagatctccttttccagatgggtgcttgttttcctgagtctgtttctgtgctccttccaaccttcgagttccacccagaccgtgcctgccatgctttcaaatactgcagactcaggaatgcatttgaaatccgccgtttcatcagcactgtgtctgtcacagataagggaactcccctatcgccagcaccacaggcttctggtcttcaagcccttcttaaccctccctaagtacacaagcatcctgattttaccagacagaatttctatgtatcttgtagtttcccctcactgatgtaaatagtcattaagtcattatgaagtcaaaagagcttacaatttcttggcatctgttaactcacacacgatgatacagtgtatgaaagctgttctaatgggagatctttaagtcctctctagtcatcacagagcaatagtgggccagcaagttgactcaagagagtaaataagatgcttgctgccaaacctgacagcctgagttggaccctgcgactcgcacagaagagggattggactagagaaagcatacaacgattcgtgcactgttaagaatggtacatacattcatgtccataaataatgggaaagataaacaaattgcaatatgcttgccaactatgatggaataacaaaaacaagaaataaaccaccaacacaggcatggaagtgttttatctttaaaactattagacaagatgggaggaaaaagaaagaacctctaatgcttatcagactgcgcatcattctctcatataaactacaaggagtcaactggggagctaaattgatggcttagcactggctgatcctccaaaggtcctgagttaaactcccagcacacacacagatgctaacaacggtctataactgtagtctcatgggatttggtgcctttttctggtgtacagacatacatacaggaaaaacacgctcatatacataaataaggcaaggactcgataaatggctcaggggttaagagcactgactgcttttccagaggtcacaagctcaattcgcagcaaccacgtgggggctcacaaccgtctgtaatgggatctgatgccctcttctggtgtgtctgaagatagtgacagtggactcacatgcataaaataaatctttttttaaataaataaataaataaatctttttttaagtcagattttctacttgattctcttatttgctgctcactaaattccatgtgtgttattctcctgaggatcaaataggcatctgctgacaagatgtcctagccctcaagaggacagcttgggtctcagcctaatagaattatccatgtcttccttggagtcactgccaaagatgaaaaagcttataaaactagagctcctctaagatgagactttcaactttaatgactggaaaattcaatcaaatgcttaaagtcagttattctcataacatcaggaacctgattgcacaactttaatctttgaggactagtaatcattcatatggaaaaatgcagtttcacacttggccaccagaggggagtgtgtgcctgcttgataatttgggatcagctcagaaaccgcacacatcctctgccagccccatctctctcctgaaactatcctcaccatctctctcctgcaactatcctcgttcacatatatgacccgtggatgactgtaccaagagcgttcatgtgtgaaatcactactgtttcatttatgtcccagctgtgcctctaactctccatctgtctctcaatggtgtttttcattgtccttttattgggtgtttggacttcatcatgtagtttcctataaggtgggaaacatcacaaataaacttgtgttagaagtatggaagnnnnnnnnnnnnnnnnnnnntggcagtgactctccactgactcatcaggctgcacagcctcggttctctcagagatgcactagtaattctttagcctaattagacatttccaggtcacagagacctggaactatttgccctgttatttttgaaggcctttttccaatcagagcctgaaatgtttccccagtgggctcattaagtcaagcacttgctgtaactacacgaccagtgaatgtggaatcttacagacttaactctccctggcagactggtctgagaaggtatgtcaccgtccctctctcctgggtatggaattatactgggcaaaggtgatgtgcggccatgagactgtgtttgtttcggttctgaaacacctagtggaaaatcacaacacaagacagaaagttggagatggctgaaatctcatcacaaggcaagatgctttgcagaactgcctcctttacaggcttagagacatgccctgccttgcattggggcactttattcttccacactcccaaagcttaaaagtaatattccctgtgtagcgagcgtcttggcaatatatctgttcacctcaacataagagagggacatatttcttaactctgaggtgagggaacatcaaatcagtctcactggattccagcagttgtgtgtgcatcctgtggggaggtgggaaacacagggaagtttcatattggatgcttgcacggcagagagactttctgtgagcagcagaccacacacgcctcctgatttcttgtaagtgtatccgttttcaatgactgatgcaacaattgtagatgtccaatcacctatgattaaccttaatattgcatagtgctgttttgttttgttttgttttgttttgttttgttttgttttgttgggttttttttccagagcagatattgttccaaggctacagagccaatataattttctcagcttgtgtgcagtcttccctggctcccttccttagctccctaactctgttcatccaagaacacacttcgagaagcccatcaaggggccccattcctaggcaacacccttgcctacaagaacacacaaacaaaaactgctctatttatgggttggggttcaaaactctcacgaagaaaactcttccaagaatgagagtttgaccttttctgcaggattcttatggtgcctatcagttctgtctgggctgaacatcaatttcattaaattaggtttgcatatnnnnnnnnnnnnnnnnnnnnttctaatggggagatctttaagtcctctctagtcatcacagagcaatagtgggccagcaagttgactcaagagagtaaataagatgcttgctgccaaacctgacagcctgagttggaccctgcgactcgcacagaagagggattggactagagaaagcatacaacgattcgtgcactgttaagaatggtacatacattcatgtccataaataatgggaaagataaacaaattgcaatatgcttgccaactatgatggaataacaaaaacaagaaataaaccaccaacacaggcatggaagtgttttatctttaaaactattagacaagatgggaggaaaaagaaagaacctctaatgcttatcagactgcgcatcattctctcatataaactacaaggagtcaactggggagctaaattgatggcttagcactggctgatcctccaaaggtcctgagttaaactcccagcacacacacagatgctaacaacggtctataactgtagtctcatgggatttggtgccttttctggtgtacagacatacatacaggaaaaacacactcatatacataaataaggcaaggactcgataaatggctcaggggttaagagcactgactgcttttccagaggtcacaagttcaattcgcagcaaccacgtgggggctcacaaccgtctgtaatgggatctgatgccctcttctggtgtgtctgaagatagtgacagtggactcacatgcataaaataaatctttttttttaaataaataaataaataaataaatctttttttaagtcagattttctacttgattctcttatttgctgctcactaaattccatgtgtgttattctcctgaggatcaaataggcatctgctgacaagatgtactagccctcaagaggacagcttgggtctcagcctaatagaattatccatgtcttccttggagtcactgccaaagatgaaaaagcttataaaactagagctcctctaagatgagactttcaactttaatgactggaaaattcaatcaaatgcttaaagtcagttattctcataacatcaggaacctgattgcacaactttaatctttaaggactagtaatcattcattcatatggaaaaaatgcagtttcacacatgaccaccagaggggagtgtatgcctgcttgataatttgggatcagctcagaaactgcatacatcctctgccagccccatctctctcctgcaactatcctcgttcacatatatgacccgtggatgactgtaccaagagcgttcatgtgtgaaatcactactgtttcatttatgtcccagctgtgcctctaactctccatgtgccatctgtctctcaatggtggctttcattgtccttttattggtgtttggacttcatcatgtagtttcctataaggtggaaacatcacaaataaacttgtgttagaagtatggaagtgcagagtgtgtccttgtcgaatgccaccaacagctggggcacagctacgccacaccgttccctgatcacatggcagtgaatctccactgactcatcaggctgcacagcctcggttctctcagagatgcactagtaattctttagcctaattagacgtttcaggtcacagagacctggaactatttgccctgttatttttgaaggcctttttccaatcagagcctgaaatgtttccccagtgggctcattaagtcaagcacttgctgtaactacacgaccagtgaatgtggaatcttacagacttaactctccctggcagactggtctgagaaggtatgtcaccgtccctctctcctgggtatggaattatactgggcaaaggtgatgtgcggccatgagaccgtgtttgtttcggttctgaaacacctagtggaaaatcacaacacaagacagaaagttggagatggctgaaatctcatcacaaggcaagatgctttgcagaactgcctcctttacaggcttagagacatgccctgccttgcattggggcactttattcttccacactcccaaaacttaaaagtaatattccctgtgtagcgagcgtcttggcaatatatctgttcacctcaacataagagagggacatatttcttaactctgaggtgagggagcatcaaatcagtctcactggattccagcagatgtgtgtgcatcctgtgggaaggtgggaaacacagggaaggtgggaaacacagggaagtttcatattggatgcttgcacggcagagagactttctgtgagcagcagaccacacacgcctcatgatttcttgtaagtgtatccgttttcaatgactgatgcaacaattgtagatatccaatcacctatgattaaccttaatattgcatagtgctgttttgctttgttttgttggttttttttttttccagagcagatgttgttccaaggctacagagccaatataattttctcagcttgtgtgcagtcttccctggctcccttccttagctccctaactctgttcatccaagaacacactttgagaagcccatcaaggggccccattcctaggcaacgcccttgcctacaagaacacacaaacaaaagctgctctatttatgggttggggttcaaaactctcacgaagaaaactcttccaaggatgagagtttgaccttttctgcaggattcttatggtgcctatcagttctgtctgggctgaacatcaatttcattaaattaggtttgcatatggtttcaacagacaagtttgtcttcaaaacaacagcaaagatacaaggaaaaattaaataccacttattatcttccaataactcaatttctattttctcatacagtcttagagactgtttttagtatttccctaccaaaattgaaggacatcattaatatctttgtgtttatcttacacacctgctgtgaatgttcacatggtgagagaggtacacattgaaagtttggattgatactgtcaaaatgctccacaaaaacattgtaactaagtttgagcccttctttttttaaatttttttcttagatattttcttcatttacatttcaaatgctatcccaaaagtcccctataccctcccctccaccatgctccccaacccacccactcccacttcttggccctggtattcccctgtactggggcatataaagtttgcaagaccaaggggcctctcttcccaatgatggccgactaggccatcttttgctccacgtgcagctagagacacgagctctgggggtactggttagttcatattgttgttccacctatagggatgcagaccccttcagctccttgggtactatctctagctcctccattggggtccctgtgttccatccaatagatgactgtggccatccacttctgtatttgccaggcactggcttagcctcacaagagacagctatatcagggtcttttcagcaaaatcttgctggggtatacaatagtgtctgggtttggtggctgattatgggatgaaccccagggtggggcagtctctggatggtccatccttttgtcttagctccaaacttagtatctgcaactccttccatgtgtattttattccccattctagggaggaatgaagtatccactcattggccttccttcttcttgattttcttctgttttgcaaattgtatcttgagtattctaggtttctgggctaatatccattcatcagtgggtgcatatcaagtgacttcttttgtgattgggttacctcactcaggatgatattctccagatacatccatttgcctaagaatttcataaattcattgtttttaatagctgagtagtactccattgtgtaaatgtaccacattttctgtatccattcttctgttgagggacatctgggttctttccagcttctggctattataaataaggctgctatgaacatagtggaccatgtgtccttcttaccggttggaacaccttctggaaaaatgcccaagagaggtattgctggatcttccagtagtactatgttcagtattctaaggaaccaccaaactgatttccagagtgattgtacaagcttgcaatccgaccagcatggaggagtgttcctct

SEQ ID NO: 799 - DNA, 1604 bp, Mus musculus
ttaaactagagcaggcggcattgatcgagcgccggcactatcttaaacgcaggggaggagctgcttaaaactttaaagtagtcgggagaaaaagcagatataccagtaatgaaacgaaagtagtaaattttttagaaagaatgaatgtagcttaataaaatattaagtggatacttaacacgtaaaccttagaatccttggacttaagacttttccacggaatgttgaaagcttttaccttggagaaatacgaactatttcgatagctgctgcctggttggtaatctgtctaagctaaggcaataactgactggagttgattcagcagtcaaatgaggtcatgcgctctaattagcactactaattattcatccaattcaggctgaaacctgtggctgcccatcaataccccttagtggagccttctttcctgtaaaataatctacctcattaaatgaatctcctgtaaaaacacagatcgaaagtaagacgggctgctgtctgctaccctgcaaccatgagcagcaatgcaacagacctcaccaccggctacctctcctctgctgcggcaatcctcctgtttggctccaactttgtaccacttaaaaaatatgacactggcgatgggatgttccttcagtgggtgctctgtgctgccatttggttggttgccttggtggtcaacttgatactgcactgccctaaattctggccgtttgcgatgcttggcggctgcatttgggcaacaggcaacattgctgtcgttccaattatcaaaaccatcggtttaggacttggaatcctaatctggggatcatttaacaccttaactggctgggcaagctcaaggggctgcagccttgcggtaatatctggaatactctacggatcgacatttgtgccaatcatttacatcaaggatcacagcagaagaaatgacagcatgtacgcaggcgctagccagtatgatttagactacgtgttcgcacactccagtggcatctttcttacaagtacagtctactttgtggcctactgtgtagccatgaaaaataggccaaagctgtatccagaggcagtcttaccaggcttgctgtcaggggtgctgtgggccatcgccacctgctgctggttcatcgccaaccactcactaagcgccgtgatcagcttcccgatcatcactgctctggggccttgtgcaccgctttttctaaagtgtagctgttcacggcaagagcagcagagggcagcagagggcagcagcggctaggagaaggacctctgctgcgcaagctaacactacaggcagctaagctgtggcactgtgggtctctgccactctgggaatgaacggataaatggctgttggctccaccaacgtgagaacgcgaagagagaccgtgtttcagttcagcgtgtgtgaaaactcttttcgatgagctattaacgaaggctggacctcgctgggtggctcaaaggcatatcggatcatcctgtctaacaatgtctacttaatactataatccagaaaataggatggagtttgtacaaaagaaattaccatcccaatttataatttattaataaagaggacccaaaataag

SEQ ID NO: 800 - protein, 264 aa, Mus musculus
KHRSKVRRAAVCYPATMSSNATDLTTGYLSSAAAILLFGSNFVPLKKYDTGDGMFLQWVLCAAIWLVVVNLILHCPKFWPFAMLGGCIWATGNIAVVPIIKTIGLGLGILIWGSFNTLTGWASSRGCSLAVISGILYGSTFVPIIYIKDHSRRNDSMYAGASQYDLDYVFAHSSGIFLTSTVYFVAYCVAMKNRPKLYPEAVLPGLLSGVLWAIATCCWFIANHSLSAVISFPIITALGPCAPLFLKCSCSRQEQQRAAEGSSG

SEQ ID NO: 801 - DNA, 73742 bp, Homo sapiens
  misc_feature (1)...(73742): n = A,T,C or G
atgctggaatattttatttggtggctggatgtgctatgatgaaattttctatcatgtcatgagatgtctgcatagagtagcctgtatatctctgagggtagcctggattaacccaaggacatggtctaggagaagccaggataaggcaaatacagatgacaaaggggccaggggagttgggatcggggaaggttataatactagggccaactatacccacagggacctaaagcatacggacccaagcaaagcagatgtaatgaatagaagagctacagccaagtaatcataaaagcagtattgaatcccagaaacaagcaggtaacaatgagctaatatgccagaaacaaaactggaaaggtacgtgtacagactggaaaaggattaataaactgagatcagtatcagaaaaagggacgaggcagatgatgaggctgggctgtaagacaacagttgggatcctacccagtagatttcattgcagtagatttttcccagtacaatgttttaaagtgggcagacaaaaggcttctttctggttttgtttcgtttttttattatctgcttgcttggtttacaatatggccctatcaagactgtattttaaaagatagcaatcagtatatctgctcttggtctatgtattcttggtctctgaataaaaggaagattatccatgagctagatcacagctgattctcccagttgtcctggctgccacagttgatttttttttttttttttttttttttttttgcttgccttcgggttagccacatcccagcttttcccaaggaaatttcagttatagttataggagccatctcatcactttttctaggagaaaatcaagtcagtggtattacaggagttggttcctcataccaccagggttagaaattttttttgtgtcaaaaaatgtacaggcttcctagcaccagataccggtacacaaagccagaccacatttggcctaattttaggactcaagggtatccaaggctggcaagatctatgccgggcacttggagctgttttcttgccttcttcatactaggcctatttccaaggggctgggtacagatcttgttttcacttgttttgttttggacaaaattcttgaactgctcctacgtggactcttagtttttgatctgtaccacttgaaccatacaccccaccctgcaccccttgccctcactgtgcccattcttgctttatcactcattcttgttttgacggtcctacaatactcccctcactcactccatggtagaatttgaggaggactagatctgagtgagacactattataaaagatgatctcagaggaaagctcagagctgggccaaagccttgtaagcctttggaaggactttggctattacttttagaaaaatgggaaaccactagagcaagcttgtccaacctgtggcccaggccacatgcagcccaggacagatttcagcacagaaccacacaaattcgtagactttcttaaaacattatgagatgtttctgcaattttttttagcgcatcagctattttagtgttagtatattttatatgtgatccaaaacaattcttcttcttccactgtggtccagagaagcccaaagattggaagcccctgcattagagggttttcagctgagaagtggacatggtctaaaaataatgaaaagggatcactctggttgttatggtagaaataaacagcagagggagcaagagtgaaagtaggaaatccagcacaataattcagattgacatgatggaggctcgatccaagttgtcacagtagaagtaccaagatgtggtcagatccacgtatatattttgaaaattgagggaaaggatttcctgacagattggatatggggtatgagagaaatgatggaggcaaagctgactaagggtttgggtctgagcaattatttaaaaacttacatagtgtttcaggaaatcatgattgtgccagacataattctaagcactttaccaatcacaactcatttaatcctcaaaacagcctatgagatacatgctactagagtgcccaaacttgatgcacagattgcttacatgatttgtgcaagttcccagtgaatgttgttgccactaattgagatgaatcagtacaggagtagaacagatttggagcagaactaggagcttagttttacactttttaaggtctagagactactaacaacccacttgtccaggctcagtcaacttttgctttcagctggtattagtccatggtgtatacttcttacctgcagtggttatatcaggtactctaggctggcaccaggggtcccacagcttggtcatccactgaagctagtgatatgctggtaaatgcgtaacaaccagccctccaagggaaaagaaatctagcatttgctgagtatttgctgatttgggtggtgtaaatattcacaccatagctgattttatacaaccaccatgatgttattaaaaatggacgttggaagagatgcacactatctgccctccgctgtagtgtgccaatgactgcagccactgcaataattttaaagccctagttaatatctagaaatggtatgtcagggctctcaagtgagaaggagaatttatggttggagacatagccaaagtagctgggaaaaataagttaggcgcttgaactagagttttaattatgtatgataaaggaaatatagacagaataaattcaaagagatggaataatggaggggctgcataactataggagagcgaaatggttggaatagccgattctgcgttaatgtcatgagggtggggagcagacatgactatgatggaatctgaagagattttaaagtcaggtcagccaatcagaagaagtctcagaagtaggtaaaggtgcaaaaatgacttttattgctccaatcagtgaggaaagaagcatttgagaacttcaatatcaggcagtagcagaaacactcaagtgtttgctaaatgactgctcctacaaaacacctgatccaggaggaaatttttaaaatgtttccaatgcagtgtgtccagggcaggtaaaggaaaagctccataagtgatttatgtataatataagatttgggaacctggtaagtaccaaaggcagaaggattcaggatatcaaggagtcccaagagcaaataaaggacacctaatgataagagtagagtttagggtcagaacagcactgactgaaaagaatagaatgaagatgacacagcagtgacatacataggtgggatacataggtgagaactgatgctgagacctaaacaccaagagaagttaagcatgcttagcaaaaattcagaaagggtcctgtacacatcaccaagaaattttttaagtttattctaaaggcaatgggtgccaagagaaaataccattcagggaaatgacatgatgatttacttttaaagtagtgtggaagatagaatgcaaataagcaagaccgaaagtaagtgaactaattaaggaggcacatcatgcaaaagatgatgagagtgtgaacaatggctgtgacaataggaatggaatagtgagtctgtttatagagctattttagagttagaactgacatagcaggatatctggatatggatatctattgaatatagaaggaataggcagaaattaagaataattcccacatttttgactatggagagtgaaagagaaaacttgaggaggattcccacatttttaactagaatgattcagtaagcagtgtcattcagggagataggaatctaagaagaaaaagagagatgggaaaatgtgtgttcatcaggactcttgattgcaaatgagaggaaactcatctgccttaggcaaaaaatgacttttattgctgcaccgaatccaagaaagaattaaaccaacaaacaatggtatagtggactctggtagctatagtgctgtcttctcagaatgtattacaatatcctttatagtaactgtacccttcacttctcatgttttctgtaaagctgtgtctgactctgacttatccacagacacagaagtagcatatgagctgggtctagccagagtgattggttcaaaggtggtcatgagacctaaactacaccaatcaggagccttcattagacttttcccctacagcctttgtcttcggggtcatcctttaggaaggatgaaaagacactggagcagcttgcagccatcttcctcagtgccctagaaaaagcataactgcatgaagtccagttgagactaattcaaaagctaaaataagcagaaatgggagatatataaaaacagaaaactagcagtcctgaagtgccagaagcataaatagaggcctggttactgcagctatttgattatattagctactttgatgtccttcccaattatataagaaaatgaatactttttttccttcttagtatagttagcaagggtatccataatataaagtacaagattcttcattaatacctgttgaaaagatagcctactgagccccaggaaaaactagatctagccaccagaatgtcaccagaatctagttttctacctttcatctgtacctgtctctggatgtcagttttattctttctcactgcagactgttttcattcgtatagtcggaaatgtgactacaaacagctcccaagttttacttctgataggttttatctccgaagggaactgccttttattttctgtgcttccaatttcaaatattctaaggaaggattgtaactgacccatcttgtgttacataatggatcaaacagttgtaactagagtcttaaaatactatgattggcttagcttgggccaggttgacattcctgaaccaatcaaatgggagccagggtggtgggctcatgcaagaaaatggcaatgctcatggaagctgtaaaattagaccagggagagaaacaattctaagaagaatagaggttctatttccagaagaaggacaaatgtagctataagtgcctcttgtaggaaagatggtattttaaacatgttgaattgttgaatttgagaccccatggaggaccaaaaggaggtcaaggaaatgcggccagttgaaattattactcaagcctgcaagagaaaatttatgcatttatctgattttgatgaaaaagattatttcagattataaatttcaaattccatatatggttttaccccaaatttacctaggtctctaggtttcaaaacaactttgcacatgtaaaatgattatgcactgtaatacagtaattgtcaattaagagaaagggttgtgaatcacagaggcaagaccttaggagaaaaaaaatcctgatctatgtttctcccctatgaggaaagagacaaagctatggactagcagagcctgaagaccccaagatttttggtctaagaaactgtagtattgcaactgataaagggaagatatgtctagggcaggtttggggtaagtttgagttgtctctcagacgtccaagtggagatactgagtaaggtattagatatatgggactggatttcagaagagtgatctgggaactccaaaattaagaggttaggaataaaaggaagagccatccaaggaaactgatgaagaagctttgagagtaaaggagaataaccaaggtaatgtggtgttctagcagccatgtgaatgcaaaacctgaaagagaagggaaaaatcaattgtgacagatgctgctgaagagtgacacaaataacgacagagaattaaccattagacttagcaaactggctgccactggtgattttgacagtttctatgcagtaagaagagcaaaaggcaagagttacactttagccacaaatgccagccgacaaggcagaaattagatgggtcgttgtcctggaaactagaggatttatgagacatagcatctaacatcttaggactctgattcatctatgttcataatgccctgaaagccccaccccttccctcagacacaaggacactacctgagggagataactcggggggttggagggctgtgtaataaactaagcgttgtttgtgttttactttttgccaaggcagactattgataaagcttctgcctaaattaacagatcaaactaagctttaaatcaaagttaatgttttttcttcttaccagcaggtgtagagaaagaacaaatcaactatgacaaaactaataaaactatattttatcctcatgttggatgtgttacctgtgttaaatctttaaccctcatgtgggtcaaatttttcttatgttttcactagtaaacttcccatatcaattcatagcttatgcttgataattttttcaagcatatctgattttttcttacaatcattaatatttgacaactgttaagctgtatcttactggtgattttggttcatgaaattgaataatatccaggtaaaatcctaaaggtaaaaatcaggataagtttgaaaatgggtcatccacctgaaaagtagaagaataatgggaagagagtcaaaatgagaggactcaggagttagaaacaaaaagagagagagagagagagaaggggtagtggatgaagcaggcttagataatttttgaaagtgcatgtaaaaagacacattacagttttcaccttctatagatacttatttgcatgtgtatttcagatctcattaaagtttcagaataaggtgcatatctcacaatattttggaaagcatattaagaactaataacacaagcactgaaatcagagaaaatttggtttaagaactagcactaccacttattagccacatggatctgagcaagttactctttgagactcagaatcctcattcataaaatggagaaaataatagtatgtaactcaccaagctgttctaagaattgaacaagatgatgcagataaggctctctttgcagtgccttcccaaataaaggctcaataattattagtagttatggttagtgttattatagatcattgagaagtctttctttagaagccttttccatcagtacctttttttttcttacttatttctccagccctcttagggcccttgaagaatctcatcaatgatactctcaccagcaccttcaattacctttctcctctgtattttcaccaaaggtattatgccaactctcaccctgtgaatccactgactggggaacattgtttaagaaaatcacatggctgtgccaacaagcaaggtaggaacggccatgtggtgacctgtgggctgaagttaagtgttgtggtttgatcattgtgtaaggtagaatcagagctggatctcaaagaatgttgacttcatttcttcttcctttttttttaattagttgatttgtttggtatatttatttacttatatattttttgctttgggttttggttttgtttgctttaagttttgggaattccttacaggagacacggcacagaagacagaggcagaagcagctttattgaaaaacagagcatgagtagaacgacttcaaatcccatatggcaccacagtgagaagtaacttcctctgagcttcttagagaatccaacaatgtcctgcttccttggggagctgcagccatgggcacatgggaatagggcttccaccaagagtcccgtcagtcacagcaacaggaggtcttcctcagacaactttgatgatagtggttgttagccagagcaagctagaaccagaaagaaaaactatgaagatgccacagtgggagtctgagcaccttgaggcctcctgttggaaactggcaaacctaactgtgggacacttggatgctgagttctggtaaacatgctgtcggaggcacggtaatttagtcattaacatttaaaaacgatctaattctatatacatactctgttgaagacttcttccaaccaccttgtattataaatttaaaatatgaaatacaaactctttatgtgtcttgactcagattacctaggaagggacagtgacctattcatcaatgtttagaattagagtaagttatagaatatagtctgagaaaattacttggaccaagaaagcaatgtccctgacattcatcaatctagaaccagagctgcagattaagctaggtgcaaatttatcagaaaacaatatttttcccaaatacatattgcagccataaaatgccctaaaaacccagttcttagagggactattgcttacttactgagaaattgtattctctgaaatcatagactatgagatgcattgctgtttaaaattattgcaataagaatgaaacatctcactcttatctggaggagttaagtcattgtgatcagtgaagccttgatttaagctcctgtgcaaagcttcagagaatgggtctcaggacacaacatttgacatctattttgacttcatttccaagaaaataggactgctatggtttgaatgtttgtctccctcaaaccaaggtgtcggaggtggggcctaatgggagacgtttgggttatcagggagggtccctcatgaatagattaatgctctccctgggggtagggaacagttagtgagttcttgctttattcattctcaagagagctggttgttaaatagagcctggcgcctccctcctccctccttgctttctctctcaccgtatgatcttagcacattacacctcccctcaccttctgccatgagtggaagcagcctgagcctctcaccaggagcagatgctggtgccatgcttcttgtacagcccacagagcagtgagccaaataaacctcttttccttagagattgcgcagcctcagatgttcctctagagcaacacaaaatggactaagacaagaaccataggtccatttcacagtacagagctgaggttgaccccttttatacacaaccatactttcttagagcccatagaatatcatttcatttacatcacacctaaattccactctttagcaaaatcttatgttaactctatattttcctttgtttgatgagataccccacaattgctctgttgtgcagtccccacactgcaatgagtcagtaaactcaattggtttgtttacaggttgtccctggtggttttaggctgattgggctaagacaaaccacatcttattttttaaatgtctcctttaagcaaatgttattatctgtattttactctattccataagcagaagtgacaaagtagtctaattttaccaaaagatgcttatagcataaaactttctatgctgtaaacatagaaagtacttgaaatcaaaaagaaaaaattactgtccttaaaatgaaaaaaaatatacacacagagttggggttttttcactttactaaagctcaggctgtgcttattacaatagaacagtgatcaaaactacagctttttttcctcctttataatatgaccaaacaagggttagtggcaatgagcactgcatcacttaaaagatactgaaaaacttgaaatactgatgaacctctaacaaacaccttcttcccaatcctcactcttgacctatgaccttgtttccttttcactgagaaacagagaaaaaattagatgagaatgtgtacaagctctcaccacaagatcttcctacctcctctaactgcacctatatactattactatcaaagatccctctgtgtccctaacaaaggctatttcctctccttttgcactaaattccatatactcatgcctatggggagacattgttccagtaattatctcctttcctctgcttgggtcagcctctaggatggacccccatgatccccacctcctggtatccgcgccatgatgcaatctgcttacagcctaaatcaggatgaaccatatgactcatagaacactgcagaaggcatgatgtgtgacttcagatgtgaagtcatagaggacaaggacacagccaccttcttggatttctcactctgtggaagggcagtgacattccatgagacaagcagtcctgtggtgaggcccatgtcaagaaggcctgagatctcccaccatcagctacagccaatttgtcagtcacgtgagtaaaccacctgggacgtgaatcctctcgacttaaccacctcttcaggtggccagagccctagcccaggtctgactgcaacctgatgagaaaccctgagtaggaagacctgcttgagctgctcccaaattattgatccacagacactatgagagataatacgtacttagtgttcttttaacccactacattttggttggctgtatttattaccctgtaacagatgactaatacatctcctgtgatcaaaacacttcagaggttccccatttctctcagagaaatatccaaagtccataaggcctgtgaggcccctcacattcttcccacccccattacctctctaactccattttctaccactctccttctttccacctcaaccacagctacagtgacttctttgccctttctcaaatctgcctcagggcctctgtactggacactctctccccactcccactccctcctccaggccttcactgaaatgtctccctctcagtgaggacttcctttcctaaactgcagtacccccaacctacacacacacacacacacacacacacacacacacacacacacacacagagtctctagtcttcctagctccttaatttttttttccttagcacatatcactatttcatataccatatttgtcatctattttctggtttccctttctcagatgtaagctaagttggtgcaggggtttttgtctgttcccaatgtctagaagagtgtctgatttacagtagacactccatgaaatttgtcaaatgaatacaccagtgttaagagtataagagtgtaatagtacctttaaaaatgcctcaaagataaatcttttgatttatctttatttttagatctctacccccactttagccacttctgaaatttactactagaaaaaccttttctttcgtgaagaactgtctcacaaaaatagcagttaaataggaagctatcctaacccactgtttgccttttcccttgtgaaactcagaccaaaattgaaagtcatctattgtaactatgtgttcttggcatctaaactctgttttgtttcatcttgactttcttaatttcctaggttttttcctttgttcctattattttattgtttttattctatattgcttcaaagactttatgaaattaagtaaattataaatacaaatataaggaagtatactagtcttttcttaagctcacaacaaattattacaggtatctttgattcagtttattataattacagaattgtaaacttttcaaggaataaatctttaaaatcaacaaaggtaatatttttattatttattgggatattcttttttttctttttttttttcttttttttttgagacagagtatcgctttgtcacccaggttggagtgcagtggctcaatctcagctcacctcccagtttcaagcgattctcctgcctcagcctcccaagcagctgggattacaggcgccgccaccacgcttggctaattttttgtatttttagtagacatgcggtttcaccgtgttggtcaggctggtcttgaactcctgacctcaagtgatctacccacctcggcttcccaaactgctgggattacaggcataagccactgtgcccaacctggggtattcttattgtaaaacattttacacgaaaaatatactttgaatcaggagagaaacatttcaacacagcatcattatttctcagtaaaatggcacatttttcctaatttcagattattcttggaaaattttgtttgcttctatgatataataaaattctgcttgaaaattacgtgttaaattgattccttctccatttccaaaaaacagaggaagggttattttaaacaataaagtggttgattatgttatccaatgaatcagcaggttttttactgccttcaccagtcatcatttctcattatacacagagatcctcaaaatgagcagcagatacactcagtctgtaggatcatttagcaactcggggaaggagggtaagtagcctagatttttttaaagttcccacacccaaacatctcaaaagatcataaaaagataaacaagtgttcagagattaaatatggaaaatattggtattggttttgattctatagacaaaaataaaataccacttggcagtagatttctcactttttaagtattcttgtatttggtgaatgggtaaaaagatagtcaaatgagttaaatatacatttaaataaatgggcaaatatgtattatcaattatcagttatcaaccccatcaattatttcatcatatctaaatatatataatatatattcctcggcctgtaaagtaaaccaaccccgtcaataatctcattgtatttaaatatctatttaatatataaatgttctacattaatatatttaatatttaatatgttggtcaatattaaatatgtttaataaagacatatttaataaataataaatatatttatatttcatgtttgtatacaatattaaatatataaatatatatgcaaatatgataagatcatttagggggttggtttccttcaccaggctgagaaaatagtataactgccataaaataatcacaaatttaaaataatgacattttcgcacactattttcagagcagttttagatttatgaaaaaaatcgaggagataggaatagagttctcatataacccctctctactctctcacagttctattagtaacatctgcgtttgagttgtacatttcttacagttgatgaaccaatattggtacattattatgaactaaagtccattgtttacattagagtgcactctgtatgttgtatagctctatgggttctgacacatgcaaaaggccccagatgtagtgtatctaggttaatgttctatacgagcttgagaagaatgcgtattttgctgcagttgaatgagatataactatcaattaaacccaggtgatgatggtactgttcacttctattatattcttactgattttctgcctgttcgatttgccaattactaatagaggaatactgaaaaccccaactgcaataatctatttgtgtctatttctccttgcagttttaccagtttttgccttacctattttgacactctgttgtgaggtgcatacacaggattgttatggcttattggacagctggcccctttatcattatgtaatggccttctttattcctaataatttccttgtctgaagtttgctttgtctgaagttaaaatagttattctagctttcctttgattagtgttagaaaaatatattttgttgggcgtggtggctcatgctgtaatctcagcactttgggaggctgaaggaggaaggtctcttgagttcaggagttcaagaccagcctgggcaacatagtgaaacctcatctctacaaaaaattaaaaattagcttgttgtggtggcacatgcctgcagtcccagctactcaacagactgaggtgggaggatcacttgagctcaggagttcacgactgcagtgtgccatgactgtgccactgtactccagcctgggtgatagagtgagaccctgtttcaaaggttaaaaaaaaaaaaaggaaagaaaagaaaaatataactttctccattccttttgtgtctttataattaacatggatttctggtaaacaacgtagagttgatgcctgtattttattcaatcagtcgttgtcttttaattggtagaccatttatatttagtgatacttgatagagttggattaatatttcccatatattaattgttttctgtttgttgcccttgtaattatttcccttttttgtcctcccctcttcatatggtttggctctgtgcccctacccaaatctcacgtggaattgtaatccccataatccccacctgttgagagagggacttggtgggaggtgattgggtcatgtgggtggttttccccatgctgttctcgtgatagtgagtgagttctcacaagatctcatggttttataaggggctcttcccgctttgcttcctctcacctgctgccatgtacaacatgcctttgcttctccttcgccttctgccatgattctaagcttcctgaggcctccccagccatgcagaactgtgagtcaaacctctttcctttataaattacccagcctcaggtagtatctttatagtagtctgcaaatagactaatatacctcttttgctcccttttctagttttaattgagcattttatatgattctattttctctcctctcttagcatatcaattatacttaaaaatatgtttttagaaattgtcctagagtttgcagtacacatttacaactaagtccacttttcaataacactataccatttcacaggtagtgcaggtactgtataaaagattattcccagtgcctctctcctgttccttaaagcattgctgtcatttatttcatttattcataaactaatatcacccaatatattactgatattattattttgaagttatctatgcgatcaattaagaataagaaacaaattataggttggtggatttttctttcaacactctaaatatttcactctactctctttttccttgcatgttgtctgagaagtctgattaattctcatccttgttccttataagtaaggtgatagtttttcctctgactcctttcaatattttctctttattttccacaatttgtatacaatatgcctacatgtagtttttttaaaatttatcttgcttggtgttatctgatcttcctggatctgtggtttgatgtctgttattaattttagaaagttgtccaccattattagatacctagataactattatttatgtatcttctgctgctttctttcttttccttctggtattgctattacctgtattttatgccttttgtaattttcatacagttcttggaaattgtgtttctttttcctattctgttttctgtttccatttaagtttgggaagtttcaactgacataccttcaagctcactgattcttttgcagctatcaaaagtgattctcttttctattgtagtattttttgttctctaacatttccttttgattctttgagttttcatctttctgtttattcgttcttgcacttttcccagttgatctcttagcatattagtcatagcatattttaaatttccagtctcataattcccaaatccctgccatatctgaatctggttctgaggcttgctttgacatttcagagctgtgttttttcttgccttttagcatgccttataattgttcattgaaagtgaggcatgatgtatcagataatagaaaacaagataagtagacctttagtttttatgtgtattgggccagaagttagactgtgcttaatggttgttgtagctgtaagtatcagaggcttctattttctctaatatctttctttttgtctcccctatttgttgtctttgggttttcctagagactcatttttaagcagagtctgtgtcttgcaactctctctagttgtgatccacagttattataccaaaacactatttatgtggtcgtaagatattggagagttgatacattctataatgttatgataaaatctctatttttaaattcttatttctttttaaacaattttagattcaggaggcacatgtgcaggtttcctacatggatagattctgtaatggtgaggtttgggcttctagtaaacccatcacccaaatagtaaacattacagccaatagataattttcaatctgctctcctctcccacgtttccctgttttggagtccctagcatctattattttacctttatgtccatgtgtacccattgtttagctcccacttataagtgagaacatgcagtacttgattttctgtctgagttatttcacttaggataatggcctctagctccattcatgttgctgcaaaggacatgatttcactcctttttatggctgcataatattccatagtttatatataccacatcttctttatccaatcaactactgatggacacttaggatgattcctaattgtgaatagtaccccaataaatatatgagtgccagtgtcattgattataacaatttcttttccttcaagtagatacccaatagtgggattgctgggccaaatggtacttctattttcagttatttgagaaatccccatactgttttccgtaggggttttactagtttacattgtcattaacagtatatacgcattcccttttctctgtatctttgccaacatctaaaactctgttttctagttgtccagaatccctgagctgtgaacttcataagggtttcttcttttgtttttctccttatgtgagaaagaaagtgtagaaggtgttcaaactgtctagttgccttttctctaattcagataaagctctggggtaaagtttaccttgaggacaggcttttgtttctgagtatatttcaaatagttattgttttcctcccacatgccagaaaaaagaggaaacttttgtcctgtcttctgaaagtaaaattcattaatgtgtggatgctcccatatgaatgactcccactgtctctgagttttcaactctcaagttagtccacactcagccttcagcaataggccaaatactgtataaatgcccccctatcctttactggctccagtggcttttgctgtcctgataagctgtaattctccgtattcacctatttcttcagtttgcaaagaggtggcatgtcctatgacatcaattctctgcagatctaaaaagagtagttgatttttgatttgctcatttttttcttgttgtgatgatggaagtggagactttcacacctttcaaatgtcagagcagaaaccagaagtcctagtaataatgttatatatatatatctcttttgaccacataaaagggggaggtgcacaggtcttattattatcattttacatataagaaaactaaggtttaaagagattaaatgagtttccatgagaaatattgctaacagacgaagctaaagtcagaacctggatcttctagtgtctgccaggactctcccaatacagaccattctgtttaggcattcatgtatacgaaacaatttgaaagaaaaattttagtttaagaatagagtcatgcatgtttggatttgctctgtggcataatgtaaaaggcaatggcctagcatatccctaatgaatcttctcaggcctaattcagcccccaactcacttttagactttagaaattctcagcaaatgctgacacaagcttcagtttctccatgtgagtgaagcaagaataaaccacatgatcttgtgaccatgaagtgaaacaattctaggttggatttaggccctatatttttggaagcaagtttgtgtatgtgtgtgtgtcttaggtgtgcatgtgtggaaaggggaactgatttcttcaaaatctttctgaactgctaaattaatcctcttccttaagtgaaaaagctttgctgctttaattctttaaatgaaatgttattttgccttcccatctgctcatctgacatgatagtctatggatgtgattaatgtttaaggcagaacttccttctaggaaatgtcatattttaacagtccttgtgttttctccttcctgtgaatgctacacccattaccaaccactggatggtctcgggttaaatagcacttcctcagagaaggcttctttgaactcagactagcacagaacctacacttcccctttccaacttaaagtttgcatcctttggtgtatgcgaacccacatgaagagatgttttttttgttttgttttttttttgagaggactccctcactttgggagggcgaggcgggcggatcacctgaggtcaggagatcgagaccatcctggctaacacggtgaaaccccgtctctactaaaaatacaaaaaaattagccaggtgtggtggtgggtgcctgtagtcccagctactcaggaggctgaggcaggagaatcgcttgaacccaggaggcggaggttgcagggagccgagattgcaccactgcactccagcttggacgagagcgagactccgtcttaaaaaaaaaaatacagataaatggcctgtacagataaatggcttaggtgcatctacaaagaattagtgattacaagtgaaatcttgtaatgtcacaagaaatgttaatgacgtcagtggtgcagatgaatttcttaataccaagtggaaaaattcacttgagataatcttttacaatggtgtgaaattcctcagacttttgttttatccataaactgcacaaataatacctccctctgtgacacttagagagggtgacatgctgagagtttcctgaataatcacctcttgaaatacacaaaactcttctagtttcctggttgaccgacccagggcttgacgactccttttgagccacctgacaattcagtccagcacagcaactgaaggaaggcgttccccaacctgctgtcctatgaaggcctctaggtcaccggtgctaaagccctcctttctccaccctccttaagtggaggtaaacgtcccagcaggaagtcaaggctggattggcgctcttcgcgagcaccctgggaacgggagtctgggtcacgggtgctagagccctcccctctcctcccggccggtgtatgggaaattgtccccgcagaaagtaaaggctggccaggccgcccccagcacgtagagggaatgagtcaggctccggctccacactggcacgtagtgggcggatcgcgccggcgctgagtaggaaggagcttcagccgccagcccggaacgcagtgagtacagccactcaaaggaaagccaagtcgctttgcaggggagcgtctcatgatttttcagaaacgtgctcatggttaaaaagaaaaatcaaggctcggaataaatacattcaagcactgttaattttagcccaaagacaggcggtacttgcctggagatttgggaaaatcaacatgaaactaaaaatgaaattttagttggagtggagcaagcagtattgatcagaacataccaaatacgaattttttcaaagtctgcgtagaagtttaaattactaggaaaaatgtaaaggagaagtatttactaataaatgaaacaaaagtaataaaataaaaatgaattaatatagtttgacaaaatatcagcgaacgctgaaaagaaaacattaaaataatgtttgagactttttaggttttgtgcaggaagaattgggaaaaatgtgctggatggagtgatactgcttttcttttccacaaaaatttcattattttagagagcggtagagcctttttaaagacagtaagttattgccaattcacaatgaaataagatcacatgctctgaaatgtacaagagctgcatgcaataaacttcatttatctataggtaataactgattgatgtttattcagtagtcgaaatgcacctcatgcactctaattagcacgtcaaattagtctctccgtttcagaggtgtagggcctttgtggagccttctcaataaaataatttgccactcttgaaggttagacattctcttctatcaatgtacacataaaggttttgttttgctttgcttgttgtgaattaaaatggggagaaaatgatgtgttagctatcacccagtcatgtgtctttttagtcataggttagcttttcaagacacttcctgcatctctgacctgttgcacctctgttatcttggcacctctgttatcttagcagcaagcacctgcctcagctgacccttgagccataacccatgtaagtcactgcagggctgaacctctctttgagcctaacagtagaataataattatttttattgaatagtgttaatgtgtcaatgttgaaatgtgcctcagtgtgtcttcctcaaccacatccctatagaggatgttttcttaatagcaatgtgtttttgttttaagaaagtccacacaatttcaaatacacattttctttactaaagtttattgaccagttttgaagtgatccttgttttcagttaaactatctttaataatggtaaataacatattttgtaggttgttgtatatttaatattctctgcaagaacacataaggaacaatacatggacctttaaatatttgtcattgtgaaataaaataacaaggaaaggtgatttcaggtgtactttattcaatacatatatacaagaagttattactataacattaaatttgcaggaaaaaagaaaccactggattattctgcttctattccagagggcttattccaaagggccagtgtgcaaaatatgaatccaagatggcattgtggaaagacgctgtacctcctgtgataaaattactttggtggtgcttttttctcatgtatctcgggaaactaaaaatctgaattgtattcagtggccttttccaaatggtaactttatgaaaaaatgtctaattcttggttatttgtggttttagtcctttcttcatagagaagctaaagctgttaaataagcttagcagcgttatccgctaaaactttctgcagtgatggaacctacacaggagaattttttttgtaatgtactaaaaatttgtcttcagggcttgttctttttaaattgtaggctagtgatcaaaaatatttggtgatagaataaattaacatgaagtacaaacattatatatagttgtgtaatatcctatctgcaaaaaggagtcttagcgtgcttttgaaaaattcaataaatataatatgttaatcacaatttggtcacagattcacgtctcaattgtttcattttttcttttatttcagaagctcctgaaaagtacatcaagtctaaagtgaaccagctaactcattaagactggaatcatgagcaacaatggagcagacctaacctttggttacatctcctgttttgtagctatccttttgtttggctcaaattttgtgccacttaaaaaatttgatactggtgatggtaattatttttccttgattgttaacgttatattatttttaaaaatgaagttccttttttggtcttttaaaagtatagctacaaaaataaatcatgttgatcttgatacctagtgaatagagcttaaaattagtcatttgacagtgctcataccagtttgtctgaaagtcagaataggagaaccattaaggttgtttcatggtaaagttagggagggtacagtcaggaaatctcttgggccattatatgaatggaagaaatttatagtcagttctactataacacctgttttgaaaacatgaatcttcaacatgattgatatattagagaacaatgtaagcataacagatttttggcttgcttatgtgcaattttgtccctgagaaacctctagataggcacagaagactgcacctagatgaataaagatgtgtgataatacacataatgcacgcagacacacgtacaatcttcaaatatcgaccagctcccttagttcatcacatgtggttatgatgtattccacccaaccacatctcctgtcccaactcctcacccaataccttcacagtaactcgtaagctgcaaccctttggatgctcacttccaggagcaaacttctggtgtttttcaattaaaatgccctatttattacagcatcatgtaattaaccagttaaccagttaaaactgtactactattttaattaggttgagtgttgttctcctagccccattttcccattatgctctgtagtttttactgcatgattttgcatagtgcagtgatttcaaggaatgcacatgttacattatagcagaactgactaatgtgaattttggggaaggagaagcaagagttatttgtatttgcctgacttccatattaaagccaggagaaggaattgagatttatggtgaacacatgttgggaattacttccttggtagtatttatcacctgacagcagttgtgttatttccccaattctttgtcttcgtgcacttagaaaataggattacctcctattttcctccagggcctttcttctcttttcctctggagttaggacaagaatgggaactacccgaagaacaaaaaaatgggtagaggatctagcttttttagtcttccacaattagctttgtgatcctgggcaaatattaccagctctgctgttttcagtttctcatttgtaaagtgaacaacttataaaatgaagtttcttttcatctctgtgattctactctttttattttttatttttcatttttttggggagatagagtctcactctttcaccgaggatggagtgaagtatcataatcttggctcacagcaacctccacctttagggttcaagtgattctcatgtctcagcctgccaagtagctggaactacaggcacacactaccacacccggctaatttcttatatttatggtagagacggaatctcaagggctggtctcgaactcctgagctcaggcagtccacctactttggcctcccaaagtgctaggattacaggcctaagccaccacgcctggctgattctactcttttgtcatggagattagcagccatcttttctctctcctccatcatgagattgaatccaagaggggcaacaatcttccaaagttagtgccagaagtaatacattgagttttaactgcctcagtatttctttcaatgtcaactatttcctcatccttttaatctctaaatccttaatgatgcagaagcctcaaaaaggtacagatacacctcatcaccaggttatcttcagataactggaaaatggcaactcaaagtatagaaagcagagtaaccttgacctagatagctaattctcaggtttataatgcccgactcatcataggcattgaactctaactgtatgaggcctatgtgtgaccataaatggctttatttttatcccagaggtggcataaatggtccctgaaggtttactgttgtgctattccgaagcacttactgccatattttgggaagcaagagtactcagtgtggcatctgaatgagaatatacactcggtcttgccatcactcttgggcagaaaattcttgatttgtctaataggaggaaaaaaagaatgttaagccagagcacaccgtgtctaagccttggagtcaacctgggtttaaattccagctcaacaaactactagctgtttggacaggttgcttaattgaagattcattttctctatctttgagctagggttaattatgttgcagagtagtcataagaatgaaatgtgcaaagtccatggcatatggcatttaataaattgtggccattcctgtaatatcacctcatagatattcctgagcacaaatttactcaattcaatttgaaccactaacactgagtttgtttatttctaggaatgtttctccagtgggttctttgtgctgccatatggttggttgccttggttgtcaatctgatattacattgtccaaagttttggccttttgcaatgcttgggggctgcatttgggcaacaggtaatgtctgatataacttatacttttattatgtaacataatgataaaaataattctcgttcacaataggaggaaatagcgcaaacagtgattctgaataacccttagtcatagatactagaaattaactagtttcttgccttcacatgctcaatgaatatttttggtgccttacctgatttgttccacctgatttattcctcttaatgatttatttttaagttcctggtagaaaattattatagtaaaaacattttaattattctccatctattcaagcatagctcatatattattttaatgtgttctggcccttttttctagcatgtttatcagaaaatatttattaaatagtaatctctactaataaaatttttaggacttaacctaattaggccaatgtgaagatactatcatttcaaaagggctggttaacagaaaagcaaagcaaacaaaaatcttcctgttgccttatcagtacctgaaattatataattagaattcataccttggcttggccaatcaagaaatgtttcccttcaattaatataaatacaccccaggaggtctttttttcttcaacaaagagaattccaagtatcagtgatctttagaaataatttgcattaaaagcaaataaatgttaaaatgttaaaactttattaaaaaaattaaaatgaaaatttatttattacccacttaatttgagtctctgaggagttaaatgatttagtgaagttcataagttagaagataaaagaattcgcttttaaattcccaccaggatttacattattatacctcacttatacctcagtatgattgcttgtcatatctaacagggggagaggaacagactaagcatccatccatcctgcagctctttatagccaccagagcatttctgttcacccagcaggttccactgggtgtcagtggggaaagagtccaatttgagatatgttgcagatgtggatgctataggttggagcaactgatagcatataggacatagcagaatgggaggagccaatgataatgtagagatttgattataggtgattaggagggtggtggtattgacacatatgtggaaataggaaaaagaacatgtttgaaagagaaaatgatgggttcagcttggcactttctgagcatgaacatcccgatgtttctaccatagagaacatctggttggagatttcttcttgatggtttggagaataatattaaaaccctaaagtaggtccaggttagaactgtagcactgggaacacgcacctttagctggtagctgaaatcatgaaattaggtcaagtacccaaaggacaataaagcaaggggacaaatatgttcaagggaaaatctttagggggtaccttattccagaaggaatgatgaaaaatagtagccagagaaagagctaaagagaaaaacaggaggagactcaagagatgaagacatcatggaatcctaaagaggtaaccttttaagaagagactgtaggacttgagacaaaaaaaaaaaaattatgtatttggccctcagtgaccctcaaaacataagagaatgaatgtagaaatccagaagacaaatcagcaatcatggaagagcaaattctgggcctgttttatggccaagtacttctgccagtatttggccctaattcaagtctaagaggatggtcactgataatttatcactgacagcttccatgaagaatcacagaatagagagctatgctaagggagagaaacctctgtacaattaggaattcaacacttttctttgtagacttttttcctaagcctagttcttttagcacacatactcataaatttaatgccaaaaatgtggttattttactgaaaaaataaggaactgtgctttactaaatttgtccaaatcacatgcacttcagttgaagttagaataaaaactaattctatttataaatgtattttctatatggaaataacatgtttcttctgtatattacatctacagggaacattgctgttgtcccaattatcaaaaccattggtttaggccttggaatcttaatctggggatcatttaatgccttaactggctgggcaagctcaaggtaattcaagtcaaactagttcaactaagatttcctgcatccatattctatgtaaagcaagtgattaccgagaggaataacatatgattcttattctcacagagtttatagctggtaaaacatacacatcatatatgccaccttctattgctatttgccctaaattcttaataagtgatctagatatttgatcaagatatagtgtagcattaaatctgggaaacagaggtagagagagaaaaaggaaactgatgtttattgtccctttctattgtgtgacaatttgctggacatgttctatgcatcattctcatctcactttcacaaatacgtgaggtaagcactatcttataagagagtagataaaaagagattaagtaacttactgtaggtcacagaactaagaagctaggattcaaacccaggtcttctagttccagagcacatattctttcctctagagcagggttggcaaagcacggtctggtttcccagccatttctataaataacgttttatcagaacacagccaaacccatccatttaaggattgtctatggctatttttatgttacagtggcagagttgagcagcaagggaataactgacccacaaagcctaaattatctacaaccgccttcgagaaaaagtttgccagtcccagctctagcgttgtgttgtccaatagtgtagccagaagccacaggaggccatttatatttaaatttaaattaattaaaagttgataaaattaaacctccagttttttggttgcactagccacatttgatgtgctcagtagctaatatggggagaggctactcttttgtgcagtgaagatagagaacagtcccatcattacacaaagttctatcagactggtgcccttggtcagcattaagattaacattcaaatcaattttgggaaaatgagtggaatgtggggtgttattctcactttaccttttggactccctttccactcaaagcattataaccacctcaaaacaacaaaacaaaccaacttactaacttccaatacattctctcccatccttcccccattccccacctcctgctattttctttttcttttccttcttttctcctttcctcttgcccctggatggttctcagtgattcttggtaatgatcacggcaatgtcaggcaggaaaaaaaaattgtggtgatgacagagtagggatatttaacctagaaattttttaaaagtctactccaaatattatacaatattgtaaccaattaattaaccttccatgagtcaggtgaactactttttcctacttcttttttagtcttaggaaagagacactcacaagtacttttatgtatactaactcatttaatctttgtaacaaacttataaggtaggtataattattatcccattttaaacatgggaggctgggcacgttggctaacgcctataatctcagcactttgggagatcgaggtgggtggatcgcttgatttcaggaattcaagaccagtgaaaccctgtctctactaaaaatacaaaaattagccaggcgtggtaacaggcacctgtagtcccagctacttgggaggctgaggcaggagaataggttgaattcaggaggcagaggttgcagtgagccaagatcataccactgtactccagcctggatgacagagcaagcctccatctcaaaaaaaaatttttttttaatttaaaaaaattggaaattgaggcacagtgaagataattaactttcccaaagtcacagctaataagtgagagagctagcatttgaacccaggaatctggcccctagtccatgcccttaaacattatggtgaaacatcttaacaatatttaatttgatgtgactttctggattttcaggtttggctggtttggattggatgcagaagaagtatcaaatccgctgctaaattacattggagctgggctatcagtagtaaggtacacagtcatttctagtgattttgctgttcttcaaaacatggagagtgcttttttaaggatcctgctatgtttacattttttaaacctacatttcgtaaaatccacatgcttgttcctcagattcttcatttacaatgactggttttagaggacaaaaagtgccagatttgggggcaggggcagccccagctttagctctccaaaactctgagagcctggaaaatcatttaactgctcttaagcttagttttatcatctataatatgtagaaaatcataacacatagcttatcaatgagaatcatatattttgcaaactaaaacatgctattcagaaaaagcattctgctggcttcctgatgcccctggagtagtcactgattctctcttctatgtactactcacttcctatctcacctagtttccacttcccctgtctcctcactcactcttctcaacctagctagacagctcctctttcacctgtgagaacacatactcttttgaatgcccatgtttggttgcatctgtgtctagctgtatgcactctacgaataagggtgaaaatgactttgaatctctgtatggcagtgttcagtccataaaacttaacaggaactgggtcaccttaaattcagtcttctttcccctctggattccatttatattccctgtcagttcttcacataatggatagtactgcctagaaagattttagtacttttttattcttagggaaagaacagtatatttgccttccttcagcaatgatggcttttccccaggcacattcaggaacaatctctttgtcattgaaatgttgccttagagagtagtcccaggccaattggagaaaaagataacataaattattctaaaatagcagattcctgactttttttggttagaggcaattttatgtattttgtataattcacacagaattctagctctgaatagctctctcaaaaacaatttctttacacaccaaaattgtaacataggatggcttagttttgacttaatgacaattgaaggccagtttacccagtctatcaggcattgttttcctccatatttcttctttatttagaaaaagtacattctctaaaattgcaaatcaattattcatgttctaccacttccacctatgtggccatgggcaaataacttcagttctccaagctttggtttcttcatttgtagagggataataatagcaccaacctcataaagtattttgagggttaaatgaaataaaatatgtttagtgcttcatatagtgctaattacatggttaatgctctacatattagttgccattacaattattttattaataacatttatgttcaattactgtttccctgttgggtatttgttgcccaactttatgttacagtaggcagtgcacctgaggaaccctgtagctcaatttgaacttggtctgtagcagggaaattcaagaactcttcccgtagtgcatctaggctcccttctatgtttctctgctaagaggaatttctggaatatgtcatttcattattttaactcagttaaatcagtttgttctgaagggtattcactgaataaacttggagcttcatggtccatgtttcatgcacttgaaatagggttgcattcgtttaggatattgcttttctttttaaaattaaaattattgcttctatcctctgtatagtctaatttttaaaggttggttaatttctagtcttacattttctttatatgatatacaaagtgtctatcagtctgtatacaaaacctctccaggtattttaaacaggagaggatttaacacaggaaattgtttgcaagacccagttgagcaaaagaaggaaggttgtgtcacccataaccctgaagcccacacaatactgctgaattgcctctgcctgaccgactgctcctgctgaaactactggaggcaccaccaaaacataatgtcttctcccatcttctcaaatgatgcaagtgcctccccctggcagaacctagctgccaataaagtttgggaaatgtaattttcagtcttccatgctccatggttcaggagagagtatgtaagggtgagagcagagctgacaccaagaaacaatattcagaacactctgttaaacatttgctttcttgaagatccagaagccagaggtctataacaagacagatgtccttttcaattcaaataataatatgatttggattatctttaaggacatgctctcccttcttttgtcttctcatttaacatgcctttcctggagggttatgtttactccacagcttcatctattattttaccttgtgaggaaacccaaatcatggtttctagctgtcacctttcctcaagccacagcccttatttctaactatggaccaaactacacatctctacacatactccacaggtacctcctttcagtcttatctgagataacacacagaagggaatgatgctgatcagcactttgccaacactaaaccatttgttcctttctctttgccttcaacatttcccaatcagaattacttttcttactggacccttccctgcaaactggttcctcttcctgagttctctctctccatagaaggccacagtcattcaaattcaaaacctgtcatctttatttttttccctttatatgctatgactattcctgtaaaaaaaattttgaatgtttcacaagttcttcctctgctttccctcgtcccatcctacctacccacttgtatacatgtgattgtaaaaaatctcacatctagtttccctggttccattcttcccttttgccagtatggatagttgatatctgccctacatcagggcatgtcattgtcctgtttaaaaacctttgaatgttccccactgaattcagaataaacttgtctccttaatctggcttgtcccttacagtacatctattcagccagtgtttctacacgtttcacctttctccctgtattgtgcattcattgacccaggattacaccacactccagacatctccctcagccttgaaagccttttcctcagcctccttggccatcatttaatatcatttgagattgttccatcccatgtgatgttttcttgattttcttctctctagttagactcttcccctaaactaccaaaactttttgtgcttcttccattattgaaactatcagagtctactttgtattacttatacagtcctctttattcctgaactatgatttcctgaaggacaaggcccattattttctatatacaccattcctcccaccatcaccatcaaactttcatatatagtgttttacacataattgatgcttagtaaatgtttgttgacttcagttgtcggcgtaactgcacgtgcacacacacaatttttactaagtgtgtgatgtacgggattgcaaatctagggaagctggaaagcttgaaaatgtaaagaagaatcattgggtaaaacatcaagtttccttttaaattacctatgcctttgacggcattcatagactttatcatggaactttgtatttgatgtactgcaccaagttattttaagtctgtagcccaaaacaccttgtgatttatttggttttatgttcatatacataaaataaatttgatcaccttctccttacttactgccacccactcccttgatctaactgactgggactcttctttctgatttacctattcttatgactagcattagttgcacaggctcaaaatcattgtgtattcctaatttctttttcatgctcagcaccccgtcacctatccatttggtaattaaggctttctctttactaacatgttttcagattttattttgtgccagaagtacactgagaattgtgtatgcattctcatttgattttcaccacagctctgtgatgagtgtatatccccattttttagttgaaaactgtcaagtctcagggagtgatttgttggagggttgtacacctgtttgaagtaaaacaatcaagagccttatctatagtgtccttttatttatttattcatttattttttttactttaagttccaggatacatgtgcagaacgtgcaggattgttacataggtacatgtgtaccatggtggtttgctgcacctattgacccatcctttaagttccctccccttgcccaccaccctccaacaggccgtggtgtgtgttgttcccctccctgtgtccacgtattctcactgtttaactccaacttatgagtgagaacatgcagtgtttggttttctgttcctatgttagtttgctgaggatgatggcttccagcctcatccatgtctctgcaaaggacatgacctcattcctctttatggctgcaaagtattccatggtgtatatgtaccacactttctttatccagtctatcattgatgggcatttgggttggtttcatgactttgctattgtaaatagtgctgcaataagcatacatgtgcatgtgtctttataatagaatgatttatattcctttgggtatatacccagtaatgggattgctgggtcaaatggtatttctggttctagatccttgaggaatcaccatactgtcttccacaatggttgaactaatttatattccaccaacagtgtaaaagcattcctatttctccacagcttcgccagcatctattgtttctcttttttttaataatcgccattctgactggcctgagatggtatctcattgtggttttgatttgcatttctctaatgatcagtgatgttgagcttttttcatgtttgttggtcatgcaaatgtcttctttggggaagtgtctgttcatatcctttgcccactttttgatggagttgtttgttttcctcttgtaaatttgtttaagttccttgtaaattctggatattaaacctttgtcagacaggcagattgcaaaaaatttctcccattctgtaggttgcctgttcactctgatgatagtttcttttgctgtgcagaagctctttagtttaattagatcccacttatgagatctttaatcttattttaaaaactgtggtcatgggaggctcagatgagtcataaaacacatcaggttggtcatttcctgggctacataccttgtatagaataacattatacaaataagtttttttagagttctcgtacacttataataaccgtaaaataataggaccgtagcaacctttcatcctacctcagtgacttgatgtatacactgggaacagccttcggtctgaggaaggtcagttgaagtccttactatacaagtccaaattttaaggaaaatgagttctgcgatgagtttcctcatgcttcggccatgcgtggaccagtcagcttctgggtgtgactggagcagggcttgtcgtcttcttcagagtcactttgcaggggttggcgaagctgctctcatccacgtacagctcccagtctactgatgtttaagggtggtctcagaggttgggcctattagaataaactgagtctaatacctctacacagttatgttcaactgggctctctaataccgagagcaaggtggcagggtcagggtgttgtaaacttcaatggttatgcagggattttcacagagcaagctttgatatctagttagtctagcattcattggctagtaatgtcctttggtatttattaaagtcaccacagcatggggggactttatgtttaggttttgcctaagagttagcttatctgcttcttgtgctaacagggccattgctgctaacgcccttagacatgggggccagcctttggaaaccctgtctagttgttttttttagagataggccactggcccttggccagggccctacagtctgggttaaaactccaactgccattttttttctgacacgtagggtgtaaagggttttgtcagctcagttagccccagggctggggctgacatgagtttttcttttaactcatgaaaagcttgttgctgttggttgtaatagatgtagtttatctaaactacatttttattaactgtcacccactaaaatattgacttaaatcctgtagctatttgattttaagctttaaattgatctggtattccttgtggggccccaattgcatctaaatagatacgagagttgaaagacctataaggggcttctctcactttacgatgtcttatttttttctccttctggttgatgaaatgccagggtgaaagggatagccaaatggactaaagcacaagtgccatgctagttattcggcagagtgcccagtaaaggtccacgacaataccaccacacatccgttcagggatgaacaagggctgactgattgataagctcttgaaaattcttaaactcatcacatcctttcaggtctctaaggaatgctgtttcctccctgtcgtgagagacacgaagtgaatttagtgttgggagatggaagctggatggccctcgggggctgacccgcagggtgccggacttcgggatatagcagagagagcttggcatgacttattactccaggctatagaatcctggaaaagagctaccatgcagcctatgcctggtcgactggaggaccaccttagtggagcgggggacaatctgggcctctggcctgccatgtgcacaagcataacaattgcttttgtttaacgtgcagatggaatatttgatccattttaaccaggcatttgcatcttggtatcctgtcttaattgctaaagtttgttttaagtctttaacttctatgatcctctagtaaaatgaatgtatgatttttataccagataagctaaattttacctttatattagtgtgttattaatgttaaacttaattttaataaaatcttgtagacatatttatccaatttttaatgtttgagcataaggtaagattttatagactctttttaatcttttataatttttgctaaagagcaggttggtgatttaggaaaagcctgctatgcttttattttaatggccagtttacagaaaaactgcatgatacctctttaactttagccaatgtttacacatggaattttctttctaattaacattttaaaacttgattaaacctttaaaacaaaatatacatatttttaaccttttaatgtaggtaaaaatttatatttttatgccttcttataattcttttatcaaaagtatattttattttctttatacaccttgcacataaactgttttgttttgtttttgtttttgttttacattcaggaggcctagctacttttaaattatacaacatttcttgcataaattcttttttataacatttttataacattttttctctttcacaactttcgccgacaattctttgacatgctttaactttctgacttattacaaatatttttttctttaaacaaccagttaatttatttcagggcaagaatttaccatataatactctttttacataaatcccgccccccctttttttcttttctttttcttttgaagatgataactattctttctaaagcgaacttcttttatgtctgtgggctaggctgtctgaggccacaagaatagaagttagtataatacatgttacactgttaacttttagcaaactttacttttgttgaaaaccttgtaagtttgggattttaattatcctttgctattaataagaccttgttttgtccaaattaatttagaattggtatagatggcttttttttttttttcctaacggaatagcctcataccttaagatttttgagttagtaagctgcttttttgcttttttgatttaggatacttctgaactgaactagtgaggtgtgctcacgatgaggtttcctctaaaagttatttttgttttattttttttctgttaacaaagcagttgccgctacagactgaatgcatttgggccatccacgggttactgggttaaggatttttgataggaaggcctcagtgctttcaggatacgccattgtttacactgacaatgaagtggtattggagcattatagggttacagagaatactttcaattatcaattacaggttttaaatttactttggcttttaaaggaataaggtacactgttttttttcttaactacttatatatatatctctctttctctctttctttatctctttgactttgtctctctctgactttccttttgcctctgtctcttcctctctctcttctcgcttattctgcagttctctcaaccactgtggagagctctaaaaccagctctccaagcgtatatgtatagaaccagtaaccaaacgtctatgtacagaaactggtctgggtgccctggctttacaggttaccttgggccatacctttgaaacaagagacctgtccaggcttctttctgatggccaacttaccttcaatgctggccagtctactttacacaaagttttaagttttcctggtgtcatagtactccatagtctcctttaaatcctttcttgaaatttttcaatgtatttcctagtagggtcagcttatctgtgcctgacccatgcttcttcgaggcaaaacaccatgctcacaccacacacacaccacaaagcaaagaacgggtaaaaaggcacacacacacttttgcagtttacaccaaaccaaaatcaaaaccaaaatcagagtatccagaaatccaagccaggtcaaaaccaaaaccaaagtatcaagcaatccaagtcaagtcaaaaagaaaaaccaaagtgccagtacaggcacaccgtgggtgatcaggccacgcttccactcaaatggagtaggcaagttcccaagaccagtcctgtcaagtaatcaaaccaagtcaaaaccaaaaccaaaatcaaagtgccgataaaggcatgccatgggtgatcaggccacgcttccactcaaatggagtgggcaagttcccaagactggtgctgtcaagcaattcaaaccaagtcaaaaccaaaaccaaaactaaatcaaagtgccgataagggcacgccatgggtgatcaggccacgcttccactcaaatggatggagtaggcaagttacaaagactagtcttaccaagtttcagatgtctggactccaagtaccagttccttcccagtattcagccactgcgtcgatcctccacaggggcctgccacacactgctctggtgaggcatcccaccggggcaaatgcctacccgggagcgctctcaggatccatgtcgcttgggctggtcggagtccctcgcagggatgttccacagggcaggcttaagccgcctaaggagctgcatcgaccatctgccaatcacctctcttcccggtcagggaaccaagaaatgtagcaggaggagccgcagacaaaactcctcagacacggagttaaagaaggaagtggtttattcggccaggagcatcgggcaagactcctgtcttaagagccaagctccccaagtgagcaattcctgtcccttttaagggctcacaactctaaaggggtccgcgtgagagggtcgtgatggattgagcaagcagggggtagttgactgggggctgcatgcaccggtaatcagaacgaaacagaacaggacagggatttttacagagcctttccatacaatgtctggaatctataggtaacataaccggttaggccattggtcgatctttaactaccaggcttaggtcaggcaagcccaggcctggtttcaggtctggttccttggttttgggtctggttcctaggcgccgggctacctgcctttagtttcgcttctcttcccttttctgagtataaaacaatatgaaaaggtctgtctctcttctctcaaggtcactcttctgtagggctgctgtggtttgctgggggtacacttcagggcctattcatctggtttgctcccgcgcttagagatgttactcaaggaggctgaagaacagcaaagatggatgccttcttcttcatctgggatctcggaccccaagaggcaccaacctgatgccagtaggatcattcctgtacagggtgcctgacaaaccctgttagaggatctcacccagttgggtggcatggggaacaggacccatttaaggcagcactttgactgtcccttttggagggggtgagcttcgctggggggaaaaccatttatctggtctatccagattcctcagaactactggaggaaaggctaactctgctggtctgcagagactatggccaaccctcccactaagggaggcccagggaggctagggttctgtccctgagactcaggctagagttgttggagttcctgcagggaggccccgcccagtgagaaaggatgggtcagggtcaggcctgaagaggtgctctggccacattctgccacagacagtgtgttgggctttagggaacacttcttggggatcaagctctccagcctccctggctccggcagtggaaaagcatggcctggagctatagagctggatgctacccttccctcacccagggagcttagcgtgttagatggtaatgagtcccagtgctggctgctgccccttccccaaggagctcagatggcttaggcagcaggcagctgcagctgtggtactggtcacccctcccttcgggagctcagcaggctgaggcagattccagcggagaggctgttgagaatctgcatggctctagtgttgggaccctaggccccagtggcgtaggtttgcaagtgggatcttccaatctgtaggttgcaagttctgtggaaaaagcatggtttccccagctgggtagcatgctcactcaccaattcccttggctggggtgtgggggtcctgcagccctgtgtggctctcaggtgggccactagaccacactgcttttccttcctgaccgttattatgtcagccacctagtcagttctgatgagagaatctggataccttggttgccagtgaaggagtcacacactaattatcattctttttgatgtgagcctctgattgctgctgttactagttgtccatcttggtcccacccatcctatctgtagctttcaagtgttttctaacatatcattctgtattgtttattagaaaaacacacaggtctatacagagtagaggattttcgttgtataattttgagaacaaaatgccaattgatgtctaatattaaccttacaaatatatatatatatatgcacacacagaaatacatatttacacaaatatgtgtgtgtaaatatatatataatatatataaaacacacatatatgtaactcatatatattaggctttatgcattcaattttactacatgttaaatatcttgaggaccctgaaggagatataagatgtggtttctactgtaggggtggaaaggtgtgataactttcttccctatcataagggtcatggctgacactcctataataaaagacaggttgacaagacaaaaacataacaaatttaatcaaagttctgcatgacatgggaacctgaagacccaaagacccagggaaaaaacatctgtttttctgcttagatttgaagatttgacagccatgtagaaatgtaattacacaaagggtatgatctaatggtaatagactgaggggagaaacatagcaaaacccgcctgttcggattcttcttggtctctttgtatagtatttcttcttctttgatatacagcaggacccctctggaatgagggtcttatgatctagacaaggtaggtcagagaatttctttatagccagctcctacacagaacgtggagggttgggggttgttggagtaactgatctaggtttcatggctggttttgaggaagagggattctagtgtccataactcatctttgagaagaggaattctaatttctgtggcctgctttgtgggagaaaggtgagtggaagccatcaaggcatgaggaagtcaaagagagactttccttctgaggctgcttctgaggccttccaatctcctatagttcaaagtactcagcacgccgaagtgccgtaatttggggtatcattttctgaccccaacattggcttttattgaattagaaaatctttagagaaaaaaagattacattgtggcaaatggtctagattgtgtggtaactattcttagtgttgtggggattcaaagaggaagattcagtgaggactggcccaaggggaagtttttttttaaaccacattcaacacttcaactcttctttagtttggacaggacaaagagtatctagggtgtccagctagggaagaaagagaagcaagtgcaagtcgttgtgaaaaattggggaggggggttggtagacagcttggagcagggagtggtcaggcatagaagccaatacgaggatttatgttgagataggttggatggaacataatgcagagagccataaaaatcaaaaaggaaagttaaatctcatatggaaaggaatatgaaactattcatgttttaaagcaagtaagagattgaacaaagaaacctaactagagcattttaatttttacacaaaagacagcatatgatagacactcttctgtacctagctacctaccctatttcagtgtcatatatgctttgaaagcttcttattttgtttgaaatgttgaaccatgcaaatgtattttaaaagtatttcaaaagagatgttaaaagtatcccaacgttgttcattttctcaagttaatttaatcttttgacacattttaacaaatttgcatggcttaaaagccaagagtaagtgaggcatttgttgcaaagatacaggacatcaatagtgtattatgagagagatgttaaagggaaaaatgtcactagatttaaatgtatgtttttatctcttaaactatatcctggagatcttcccatatcagagcatagagatcatcattattccatttttacagctgcatagtattccattgcatgaccatgtaggccacctcacctgagtttgagtgtacctgtgtgagtgggcctccggcaggattggtaaggtcagaagtggacacaccggtggcctcagtagatcaccccagattctcctctgtgtgagttatacagttctgcacttctatcagcagtatctgagagtatctgtcccctagcgtttgtccaactgaggatgttcaacttttgaagttggtcgatataatagctaagaaatattatttcaatgtagttttcatttgtgtttcttttacaatgtgatttcaaagttaagggaaatatctgatgtagaaggaaagcttatgagtttagcctttagcctgttgtaattaaggaaaatgagaaacatctaagagaataggagttctggcaaaacggcaggaccactgaaggggcaatttgaaagtaatcattgtatcattaggatccgattatttaaggtgtgtgtttttttcttaaaaatcaagcagcttgatataaaccagtattatgataaatatcactaaaatttattttccttacagtgctttcatatttttgttcatcaaaagtgaaataccaaataacacgtgttccatggataccactccattaataacagagcatgtgagtatagtatgagagacaacttgatttgaaacataaaattaagataaatggataatacataaattttaaacacagatgaaaaagtggtgtttgctcatcactcctggctatgtaaaatatcttagcttatttattatgggtaggtctatgtagcaatcaatcaatatttccgcagttgagcttctcagcaagcacacgggtttatttattttgattaacagatctctactaggtgatatatatataaccccatttttgtaatgatttaaagattcctacaatagaggaaccctaaatactgtagaggaatgtgaaaataactttagaaagtcagaggaaggaggttttgaagttggtccaggggagaatagaccataggaggccaagaaaggtaagtgaagtcctatgagaataggaactggtatcccattctacccgaagtgaaaaacagaaaatatgataggagtcactgttttgatcttgaagaatctaaatcagtctggaatagtaaatctgaatgaaacaggagcaacttttaaaagggacctgataaagcgcaagtgtcagtagctacatatacaaaagtgacttcagggcaaagcctcattgtcatgaacccaggctctaatccttctcatctcaagaaatctctcctgtctgccctgggccagtgctatccagctgccctctgaatccagcgctcctcacccccagtggggtattgccccttggcagggtgcttatttaccccttacttcaaaattaatcttttctcctttccttcttcccctatccaaacttttatcaactaaaaccttagttaaattgacactaaagttgaatagtaattagcttaagtgtaaagagaagaggtttattaatccacaggcatctctaatcagggaaatgtttcagggagaagggaggagttggctttgggaaagggttccttgcctgcttcagggatccagacacctcctgcccaaccatcctccaaaacaatggaacaaaataataaaataaatgcagcttggtaaaagatacacagtaggctaactgcctgagatttttctaggcaataagtttaaagatccataaacagcatgattgatgggtacagaaccatgcatcatgagctccttatgatgaaagaaaccgttattgccaaaggaaaacttgacttagcacatgacaaagaattcaaatctactttcttgtctcttacaaaaataataggattataacatcaagaacacttcagttggccaggcgtgatggctcatgcccgtaatcccagcactgtgggaggtcaaggtgggcagatcacctgagttcaggagttcaagaccagcctgtccaacatggtgaaactctatctctactaagaatacaaaaaaaaaaaaaatgagctgggtgtggtggcacacacctgtaatcccagctacttgggaggctgaggcaggagaatcacttgaacctgggaggaggaggttgcagtgaatcaagatcacaccactgcactccagcctggacaacaagaatgaaactccatctcaaaaaaaaaaaaccaaaaaaacacttcggctatagtattataatataccccccttatccacagggaatatgttccaagacacccaaggaatgcctgaaaccacagatagtaccaaacctatatatagtatgtctttgtatctgatcactaagacagctactaagtgactcgggggcaggcagtgtatacgatatgaataggctggacatagggatcattcacgttccaggtgagatggagaaggacgatgcagggtttcatcacactattcagaacagtgtgaaattgaaaacttatgaattattcatttccagaatttttcatttaatgtctttggactactgttgacagtgagtaactgaaaccacagaaagtgaaagtacagataagggaggggtactgtaattccatagtagaaatatgaatttgctcataatttttcctggcttagaatatcagcctaatattgaaacatggcttggaatgttttattaactaatttagtaaaaaaaacaaatcagtataagaaatgctcattgatcttaagcattccataggaggagagtctaatttccttacagattatgcagaccattaaaatatgcaaatgaaacatgagataataagttttattagtttttataggtgtatcacaatagccacatattaaatgtgagaatttgaaatggaagacttgccaactgccaagtcatcctaaatgaaagaggaaacaattagaaacagttgagtttagagatatcagaatgcataggtgacatgtttattatattttaaagcatgtttgaaagagaagagaaaagcactagaaatattgtcaccagtgtgattatcaattgaatgttcttttgttttaatttgggccaatgttttcaataggtgatcaacacaacccaagacccctgttcctgggtggataaactttctacagtacaccaccgcatagtgtaaggagaggttacttctttgctctattactctgtttcatatttggttaaagcagggattaccagcatgaagtaatgttcatctgagttcaagaagaaaattgtaatgcaagctttgacttctatctccatgcggcgaggtttttttgtccccagctgaattttaggtacagatgcccttgagctcaactgctttgagtaattactaaatcattgcatttatctccaaatgataagtagataataaaagcaacctaattttgcatgacttgtgtagctaaagtaaaagaggtagtaacgtgaccaacctgctctcagcagtcatagtcagattaggcaataaacttgtctagcactgcaccacccaggatgcccaccctgctctgggaatccccacactcctgtgtttagacagttatataattccagacattcattgtcaaatatagtggaacattctgtgtccgtgtgggtcctactccctctatctccataagaactcagagagttgggctcaacatcagcccctctactttagggtgttttttttgtggttgttctgttttttggacttccaaataaatatgaaaatacacactagtatatagtttgcattttacatttgatggctgctttaaacttcatgtggtgacaccttttgactcaagaatataaagccttctttttgatagcgtgtatgctatgtttacagggggaaagagcagcacctgacacatagtagatactcaataaatatttgaataatttgaatgaatgaaagaataacaaacaacatttggaagaaataaatatgttgctggttttgcgtcagaataaaaccaacctttcaaacaaaaaattttttcaaatttttttttcacaaagcctccccttcattaagatatttttaaagaaaaatatgttagttgtcttgtaattagctaggcttagtctattagtcttgtctgcgtttgggacgctccacggctatgaagtccagacctcacgtgacacagggatttccaggatgagtagaacatgttgccaaggtggtcttgtgaatttctacaggctcatgttactttatagtactatttaaattgactgatttaatttttaagctttggagggaattgtttttgcctacaactgtcttctgtttggaagggttttttgtgtgatttttttgttttttttagagacaaggtctcactctgtcgcctgggctggagtgcagtggcaaagtgctgggattataggcgaaagccaccacgcctggcctgttttctgttttctgtcattgtcctttgtgttaacttcaaggaactgttccaaaatatgaatcacctccccctacaatcattggaaatgcttgcttcatgcagatatggcccaagtctggggagtccgcctgactccagtgctgaaaatgaaacattttcttttttataaaaagaaatgttttgtctgaaatacccagattatttaattaaatcagcacttcttcttgaccatggcattgtcaactaaggcataggcaagttcgtggatttcaatagttgttttcaacaaaaatgcatttagtacttagtctgtcctagttctgtgctggatagcatggcctgttaaaatttttaaaaaatcataaagcatggtgtcagtatatagatatctcaatttaattagagtgccaagtttatttatgtagactgtacaatataactgtagcaatattctcatctatgtaatgacaacataattataatccattttaatttctataaatcatgtacttctaaaattagacactggtggactgaagctgtcctcctagtcctgatgccactttaatactgcagggtatttctgtgacttccgccagtcacagagcttgagataaatggatggtttttgcttgtttgtgatttgccttttgaagcatgtttatgattccatttgtgcgtttgtcagaaatactgctttgagccaagattaatagtgatttatttgttttgtaaggggctgcagtcttgcagtgatatctggagtactctatggatctacatttgtgccaatcatctacatcaaggaccacagcaaaagaaatgatagtatatatgcaggggcaagccaatatggtgagaataaaaagttatcttactttattaatatctactttttatgaatataaaaagaattgtgataatagtaaatattgatgggtcgattcgatctttctttgtccttgtaagtggcgaattagaaaggcattgaacaccaaaaataataaaggattgagcattttcatatgatctttaacatacaaatgcaaccaactttagccaggactcttttcaactacttggatctcaacacatggtttctgactttccagtaagatttggaaattattttccagttagatgatctctgggaaaatatatatacttctgttcttttaaaaaggctaaagtgtagtacatagtactttaaaatgaggtaaaggttaatgtatagcctacttggtcagaggatattatttttaaagtacagagtcatgcactggaaggcccaatgtaatgcttcctgttaatatctcagtttccattgacagaattaatctcccaagagtaaactcaatactatatgcaatagccttgtacaggttcaaaaggagatgaaagtgtttactttggggatctactaattatgttgaagcatggcttacaaccatgaaatgataagagaataagatcattcataaaataaagttctaaatcagatggcacagaaaattaatgtgacctctgttcagataaaggagaatttggagggcaaaagtcgtgagggaaagattgttaaagaagttgagatttgaactcaactttaacagaatggatagactgagtagatgccataatttccatcttcctttttatagttagccccatgtatattactcaaaccttttactgacttctgtctttcttttgttaaaattttatacaaatacttttttgcatttttacaaaaagatagaaattaataaaaatagaataacatagaataaattaaaacaaggtctcactaaagaaagaaaaacaagagtgggtatataaaaggaaccagaaacgaatctaaaaactttatactacatttgtatacttgctagaaaggaggcataaatttggctcttagagtccttgtaggcacaagggaaatcagatcagtctcatgattcaatgagcacaagataaaaacaactaattgttcaggagcacagatgttcttggtacagggacataataaacagtgtcctcaccaatctccacacaaagagaacaatggcttcttagggatcttgcttgtgacaactctgaatgtaatgtgatgggaacactttatcccagtttattcaaaaataatgaggggggattatttttatttcatttatttaaaaacacatatgtaatatgtgctctgtcctaagtattttacaaatactcagttaattctcatagcaactaataccctttctttgttttacgattgagaaaattaagacagagacgtgagatgatttgtccaagtcccaaagttagtgagtattgaaatgaggatttgcacccaggtggtccatgcttttaatcactgtattttgctttcttttgtggtggtccatatatagatgtattgcccttacatgatccagaaataggatttaagacttagagcaacagacaaactctctgtcaaacttttcttcctaaacatggccactcatctttgtcaaaattttaggggacagaaacattaaatccaacatggctttcccagccaagaacctgtagtgcacccatctgtgtggccacagtcccatctgcttaaacagtcagtggagttgggatttttccgagattgggccaccatgatgtgatattaactcccccatgtacttcgttttataatcaacaattgaataaagccctctctggattaacttcctgaacagccttctgtacagctgtcatctgcaacagagatgctggtctccagattgatcaatggatcctgtaaagttagcacccccaatttttttcattcacattctcactgtggtcaacctgaggatttgctataattgctattgtcattagtaaaattaggcctgagtgcctatttttaaaagggaggtattaacatcatagttacataattcattgtttcttatttagctttaccagatgatcataaaaactagcctttagttttgattatagtaactaatttactacttaatgtatctagattttaaatatattaattaaaattctatatgaacagcatgtagaaaactaggatgattaaatataattaatggggtttttttttttttttgagacagagtctcactctgttgcccaggctggagtgcagtggcatgatctctgctcacttcaagctccgcctcccaggttcacaccattctcctgcctcagcctcccaggtagctgggactgcaggcacctgccaccacacctggctaattttttgtatttttagtaaaggcagggtttcactgcattagccaggacagtctcgatctcctgacctcgtgatccacccggctcggcctcccaaagtgctaggattacaggtgtgagccactgcgctctgcctaattaatggtttatttgcctttaaggttaattctggtgagtttattttcagaaatctaaatatatctggaatgattaaaatggtgtttgagagtttttaatgtctattttcagatttagactatgtgtttgcgcacttcagtggcatctttcttacaagtactgtctactttctggcctactgcatagccatgaaaaatagtcctaaactatatcctgaagcagtcctaccaggtaagaatatgtactacagatcttcttactatatgaaagtgtcatctacaactcatttaacttgaataagtttcttctggaaacaaagccatcctctgtgtgtatatgtggtgtgtgtgtgttgtgtgtgtgtgtgtgtgcatgttcattccccctaattacttttgcccagttcaccaccaaatatgaagtattttaaatccttgaaactgaatatgcaatgttggccattattacagaacctaaaacttaaacaataaatctactaataagatattttcctgtgccaaacatcttctgtattgatcatcattctttactatttctttttcactatctaaaggttcatatatcaacaaataggaatatgcagtaacttgggaaaacagtttctacaaaatgtaagaagagatcgtgatgacttcaaaaaagacatatgttaaacatacatgcttttggatttaattcattaggcattgatcttttttaaaaatctcatttaggagtttattatgattcaatttggaatgtaggtccacaagtaaaattttttaaaggcaaaaataaagcataagtcagagacttgttctgaatgcctaacagatttatgctaaagaatgccaccgtgtagaaaatgctagaatactgaatgcctagctaaagtgctgtgaaagttttagctggtagttttacttaaatactacaggttttttttttttcttagccgtagcatcactctgatccactttattaatatctatggtttacggtaaatggtatttgcagataatgttcgggttcagtatgtcccctagtccccttttcatcacccagtctctacctcttttactactatgggtactttaatgctgataatgtgaaagcattgatcactctacccatagcaggcaagagtagagaaattacttgctctaaaataacaataaaacacagctcaaaattccatgttggccaacaacattgattagaatgcatttatatgtgcactttgatattcctgttgtagctcagtgtgagttcttcaggaggggaacatggtctgcaaatgtgtgttgtctttgtatttcaggattcctgtcaggagtactttgggctatagctacctgctgttggttcatagcaaatcactctctgagtgctgtggtcagttttccaataatcactgctgtaagtagctgaactggttttcctaattttcattttataaatgtaaacccaatttttctgaagcactcttagggcatcgctaaagactgtcatggagtttgattttttaggaatacaattaatggattcagatagataaactgaccctcttgaatcttcatgtgcttgattgctaaggaacatttctcacctcattttagcagggctgttactccttaatctttaatatccttgcagtttttggtttgattggtttatctaatgtaattttagcgacattgtaatttgctattgataactattattctctccttatataaaagtttataaatatgggacctcttaaagggaacattgaaaaacaaacaaacaatatccttcacaaaacttttatagtagacagagagttggtttttctaccattgtttcttgttttgagttagaataaagactgaggacaaaatgaaagcctaattcaaaggaaataaaccactgaagtaggtgagtgtgggcagaggatcagtgaaagtggtcactgtggcttttggcaacctgcccatcacagagattattcttgaaaaactgtaatggaagcaaagccttctcactcaccaggcataactttcttaccttgtgcgcttggtgcttgttatctgggaaggacaggtatttggaattggtgagggagtaggtccctattgctaccaggcccttgcttggttttattttagtcactttatccaaggacaaccttatctacacacagaagagttagtccctaccctcaacaatcttacattcttcattattttatttttttggtagggctagatttttaaaacttttttaaacttaaaatgtcaaacgaacctatcacctagtttcaacaattatgaatatggtcaatcaattttatcagaatacattttaaatatcccagcagtgctgttcttctcaggtatacatattcccatagttatatatccagtggtaactagactgagttccttgaaagtagtatccactttgtttattagcaaataacattccattaaaaagctaaaaaaaaagaaagaaagaaagaaaaaagtcacctagcaggggctgttacctctgctccatgtcttccttgataattctaaactgaatcagcttaatcttaagataggagcgagttcactttgttttcaaaggctgatttacacctaacttacattagtttacaaaaggaaaatatacaatccaaattaccaaaactgttgtatctcctatgaagatgtccttcctatttggctctccttggcctgaatcaaagagtcagtacatactttgacctatgcttgcattacttttaccaaagcacccttcctgtaaccacactactcacgataactcttaggccatgcttaaactcatatttagaaaacaatcagacaagaatcttcaaaggtcaatgataccttgtggtattgtcctgtaccatgttctctgaagggaaatggattttcagattaaaaattcttgagtgattagcataacattaatatggtatcctctgttctattgtttcctctcattctgttgaaagtcagtgtgggttgcctaaaagacccatatgcttcttgtttgatttggattttgaggcttaggaacttacatcattgataaaaggcagttcctttgacctatttctctggctcttttgatgttgactttccagatactgataaacagagaggagtgtattttttttgtttcacttacataccaagagtggaatcaaacttcattgactcagtccttttgtcagttggagtagtggtaggggaaaaacattttggaatctatttgaaactcttccagagtttctcggagtttgaagagcaatcataaaaatgctgatacaatacaccttctccacaaagaccacacctagcccgcattccaattttcttccttctcagctaagaagaattaccaccaaacttgaatagcttaaagtttataaattgcagaaccattcctttttttcacctgtttcttctcatttcctctgtcctgtattatttcattcttttctttgtctcctgcccagaaacccctattgtttttccttacacgtttattttaatcttcccataaacctttttttagcattcattggtgtttaatgttagccagacttgattgctctgtagtaatatcagttaaaaaaatttttaaagcacgagctacttccacaagtacattatttgttaggccaaaaagaatatgccaaaatttcttcagttacaagattatctcatgccaaagaaagttagaagcttgtgcacactttttcttattaatcccatttctagtatcctaaggaactaggccaatggaaaaaataagctatgtgcttataaaaataatttatgtcagatatattaaagtattatgtggcacaaaatattatagcatcatcaaaataatcaaaatgaagaccatgaagaaaagaaaatgaaaaaaagtcttcattttttttacttaatatcacctaaagtttagcttagtgtggagttagggttgatattatgggtagttttccctgaaaatatgtttatactgtctctaacttactatatttatatagaatctagtcataggtaaatatccaatttaattaaaatttatatttttatttaagggtccaggatttatagctgcaatgtggggtatcttcatgtttaaggaaataaaggtatgtacaagaaagggcagacttagaaaatgggaatggggtaggccgggcgtggtggctcacgcttgtcctggcactttgggaggccgaggcaggtggatcgtgaggttaggagttcaagaccagcctggccgagatggtgaaaccccgtctctactaaaaatacaaaaaattagctgggtgtggtggtgtgcacctgtaatcccagctacttgggaggctgaggcagagaattgcttgaacccgggaggcggaggttgcagtgagtcaagatcacgccactgccctccagtctgggcaaaagagcgagactccatctcaaaaaagaaaagaaaatgggaatgcattcaggtgagtaaagtatttaatatgtttgtgttattatctgaaaactgcctgtggtgcctaggtccagggccaacaactcatgaatggatttgacagataaaatgttcagaatgtgataatacctaattaggaaagaaaatactagagctatgataattataatgtaacatcatgtctctctccaccccatctccaatggaaaaatgctgtcgttgacttaaatttccctgaagtgattttaaataacccagtgaaatatgagagagggaaatttgtttaaaatatgataaacaagatgaaagattttttttttatcctaaaggttaaagtatcccctgaggtaaatcatctttgggaatagatgtttatattggttcctatgtctcccaaagacctccatgtcaaaccagcaattttgtaggaaaacagcatggtaacaggaggctattgccatttccttttcaaatgtaaatgatgggaatttaaaattgcattcatcaaatagttctagtaagagtgtgtgtgtgtgtgtgtgtgtgtgtgtgtgtgtgtgtgtgtgtgtgtgtgtatgttttctttaaaaatcactttgccgagcatggtggcatgcatctatattcccagctactcaggaggctgaggcagcagcatcacttgagcccaggagtttgatgtcagcctgggcaatcacaacgacaacaaaaggtacagtctcaagagtccaactgggttcaaatcctggctctgtcacatactagctgtgtgaccttggccaagtttcttaacctctctgtgtgtatagtccttatctgaaaatggggataaccaaccaagagagctgagagaatatgagtaaagtgctaaaaacactaccaagaacacaataaatgctcagttaattttgggggtgagggtcatataacctagcccaaactgtcgatagcaaaataaaacaagttaggagcagtggctcacacctgtaatcccagcacttgcgggaggattgcttgagcccaggagtttgagaccagcctaggcaacatagcaaaaccgctatctctacaaaaacaatttaaaaattagccaggtgtggtgaggaacacttgtagtcacagccactcagaaggctaaggagggaggattccttgggttcaggaggtcaaggctgcagcaagccatgatcataccactacactccaatctggacagctgagtgaaaccctgtctcctcaaaaaagaaaaagaaaaaaaaagaaagaataagaaaactcacaaaatcagagaacttctccccttctagccaggcatggtggcatctacctgtagtccaactatgcaggaggatcacttgagcctaggagttcaagtctagcctgggcaacatagtaagaccctgtctccctaacaatttaaagattttaaaatgtttaatctttttttaaaaaattgctttggaacttttcccagttacctttacttgtagaaaaagtcttcagttgaggaatatatgcaaatactcttttataagaatttttattaaagacaatgttgatccaaagacccctccccaatcaagtcatcatagacctgtcttaatatgcagttgtagtagcaaataattcctggttctaaggagattgatgttgctaatctctaacaaccataaagtgaatgtacttctacctgatctttaaaatgattattcaattttagatttaaaacatcatttcaatcattgtaaatgaaatattttgatttaaaatccattatttgataatacaagtaacattctcagatttaaaaaataataaacttgtttcaaaaatatgtggactatgatcagaatttttattttttttaaatacacaagaacaacttgaaacatttataaacctctaagttactttcgtgaacatttctcatttattgtagtcagagttcctttctacaaaaagtaactctatgcccaaaatatgttgtaaatctctctgcatatatttcatctacctcacaaaaaaagatttatttatattaaagaattggttattatctcatgtaagatgctgaagccttagaaaattacaaattagtcatcatagtttattagtaattataggtatgaagaagtacaaaccaagtatagatttatattaaagcatttgaaaattattttggtcatgactacaataataatactgaattgaaaatcctcttaactacatataagaaccctattcaaagagaatccctaaccaaaaagcctagtattaattgaaaaacagtgaggaatgttttgttttgtttttggtaaagacatctttaaaaagacacatcagactgaatagaaaagtaacttttaagattaatatactatgacccaatagggtttaattcaggaatgcaaggatcgttcataatacataaattaattaatatcatttactctaccatatcaaatatgaaaaggacgtgataatactatactaacctcttaataagctagaaataaaaggaagctttagtggtacagtatgtctatcaaaacaaaatagcaattatatacctgagtttcatgaaacataagagttctccatatattggaagtcaaggatttctccatactattatacgatatttcctatagatctagctagtttggaaacaccagaataagaaatgaaatgaataaatataggaaaagaaataagaaaattataatttgcagattacatttttaaaaaatgtacacattgtgatttcaatttattggtgacaaaaattaaaaattaaaataaaaatttaaaagaatcagctgaaaaatttaacatccaataagatcatttagtaaggcttgagatataaaataaatatgaaatcagttgccttccaatgtatcaccaacaaccagttaaaacgaggaaaataaatgctattaataataaccacaaaaattacataaaatctaattaaagaattaacaagtaatgtgccaggtttttaaaatactgtattttactttgctacaaacatgtactagaggacatagaagatcagaacaaatataggagacttgtcacatttctgatggaacatctcgctgttataattaggtagttctctctaattacgttcagtataattcctgtaaaatcccagtgaagctctttctagaatttttagagtaggtcctaaagtttggctaattatttatgtaaaaataggcaaaaaaaaaaaaaagcatgacagcacatataccatatttctgaaatgtgcaatttagattagctaggccagttttcttataaaataaggatttctaaacttaagaaaatgactgtttgctcttttctgttttaaaaaatgactaagataagattacaagtattaaaagaagagagagggccaagctgaaagcaaagaattaaaaaaaaaaaaaaaaaaaaaacctggggccaggcatggtggcttatgcctgtagtcccagcactttggcaagccaaggtggccagatcacttgagctcaggagttcaagaccagccagggtgacatggcaaaaccctgtctctacaaaaatacaaaaattaacctgctgtggtggtgcatgcctctagtcccagctgtttgggaggctgagatgggaagatggcttgaacctggaaagtggagattgcagtgagccaagattgcactctggcctgggtgacagagctagactctgtctcaaaataactaaccacataaataaataaacaaaaaatcttatatgtcatctacaagcaaaatttaacagatgtccaatggtacttattcaatgcagacacctaattgcctcttgacagctgatttaaagaaaaattttaaatacttacatgccaatcagtttagaaaagcatcatcaactgaacactaaagcctaaatatcataagaataatttttaaagtatttttgtagaaacaggacaaaaacccctaaactctaaagaagaaaacaaaagcaaacctgttatctgcaggactcataggtactgtcagttatatatcttaaagcagtccttgaagacgcatatttaaaagtctacaacctacagctgcgaggaataaagctgagagccaagcaccttttgtgtgaaggactttaatgattccatttagttttaatgccatcagtgcatcagttggatgttttcatacttctgatactcttttttgtttgtttgttttttgagatggagtctcgctctgttgcccacggtggagtggagtgatgcgatctcggctcactgcaaactccacctcctgggttcaagcgattctcctgcctcagcctcccgagtagctgggattacagaagcccgccaccacgcccagctaatttttgtatttttagtagagacggggtttcacagtgttggccaggcttgtctcgaactcctgatcttgtgatctgcccgcctcggcctcccaaagtgctgggattacaggcgtgagccaccgtgcccggccctgatattcttttatatctgatatctgttactcattgggaaattcattttagattattaaatctttaagctagatataaattatatttttaccaacacactttagtcagtatgtctacagtaatgccaacacaggcagttactaccacaacaatgtataggtcagtaagctactccctggtgaagaatgagatgatctattatcttagtagaaatccaagttaaaaaactttctgctttgggaagaatgttagtgtgctctttccaagagttaacatccacctttgatgaaggaaaaccattgctgttgcccaactataattagtctttttctctaggagactggacagttttagcaaaatcttaacattgaaggggaaaaaaatttttcattccctgagaacattattcttctgtctacataggtaataaaatagcgcttagcaatgtattcacgtaattagattgtagagtgcttgtaactgaagacccattttttaatttaagtaattgcatcaatttcaaattcacaaaatatacgtggaaatcaccttagtgtatttgttgtttgaacaaatgtttatggaatacctattctgcattagtaccagtatctaggtgagaattgcagtcttaaaaattaagaaaaaaaaaggtgctgggaaatccaaagcctactgccaggtgtgtgtgtgtgtgtgtgtgtgtgtgtgtgtgtgtgtgtgtgtgtttaaataagctgttctgcacttggcaaggttttcgggtgcttctatttgtagaatttgggattaaagtggcttctgttagtgctaaggatcacactgaatcagacaattcaactggccccaacctaacttgcaaagacctatctctggtcatcaaacagaggcaaatttatctactctgattctttaagttgaagaaagggaacatatatatataatttagttagtaacataattatttgattttgttaattaatacataacatatatatatatatatatatatatatatatatatagttacatattagttagcattaatcttacgaactaataatacaaaagacctttccttggcagttttcacattccctccatcctggactttgtttctgttctgttcagatttattacacaaatttacctctgatctctgcattcttccagtaaactagaaacacaagacctttaaggaagtgtgagggaagtaggcaaaatgaaaccagacaaaagtccactctttgaagtgagaatttcactgtggagccaggagagccacgtgttcctactgtcaacccgtctatcctgccccaaccctgtttcctgtgggagcccagttagaacttccctttctgggtttccctcaaagctgacctggctgcaaggcagcaaagacagaaccaccctctaccctctgaccccttgcatctatgctgggggaaatgagtctccctaagcctacactttgcatggcctggctgtaggaacccaagtttggtgcatgttcttcactgagtccttgagtgagcattaggggagatactcatgaatcagattagccctgaggattagcctctaacagcccagggtcctgcttttatgaacccactccccccaacaagtcagtcaactcttgcaccaaaaacacagcattctattcccactacctttcctgaagttttgcccaaatttgggtagtgtgaggctattaacctgttggacctcagtggccagaattttcaccagagagggaggacaccagccctattccctacagatttgaagctggcaggataccaactgctgcctagagttgcttcctctccattccttttttctttttccagaacccttatgtgtcttctacaatgacttacccatgaaccattgttatttttccttttaagaaggatctaatagtattattaaatagtgttattatctgattgtaatcttagatgtatctaaaattagagaggtgctagtcttgttttactttgtaatgttcaaaccttcccttagaatactggagtcttccgccttggattcagactctcctgatgacccacccttgggacccttagaccaggcagccagagattgccatgccctcattggcagagccaatgcccttaatcagcaggaagtagatacagaagactgacttcctcccacatcaagccttaaggataagggatagaaatctttaagtgagggggatgagacaggaataatacagggtggtcacagattaggaaaatcccaggcagcagtttcacatgactagcaaaaggaaacttgaaatagctgcagaggccatgggctgataagaccctgaaaaacagcatgtggatcaagctggctaagaccaattgaacccaacatggtgctggatttgccctaggtttcacctaggacctcattatacactcattaacatacaaatcacacacccaccagcaccatgacagttctgggaccacccatatttggtgtaaaaatgagtgacaccacagttctgagaaattgttacctttttccaggaatcttcatgaatattccacccctcggctaaagaaatgatgaaaataggaaccccaacccccttgtatgattctctcttgagtatgtccgcactccactttcttgagtgtgtacttttcactttgcaacaagtctctgtactttcactaaaaaaataaataaattagactctttaaacataaagaaggatatagacaaaatggcagtcattcagggggagcagccaggacaataaggaagcttgaaaccattccatatgaaaaatggtcaaagagctaaaatactgaccaggaaaagagatgcctccagggatatatgagagttatttttcaatgattgaggatttatcttgtgggagagatattaaaatcgatctatctgtactcctagtgatggaacttataggaaatgaaatatttctacttaacacaggaagatatttcgttgttaattcaaagatgggctgggcaacacagagaagtggttctcagtagttcccatctttaagaccaggcaccccatacataactgagcaagtccaacgaagtcattcttcacaccctctctgcatttcttcctcacccttcagatccatctccatctctccatctacccatcatcatcttttccctgggagactacagtcacctcctaattggtctccttgcatccattctggcccctccaatctgtctgccatcctgcagaaaagtgtgagctttacacaatgcaagtctgaaattttaacacagccagctgcctgtctttttaatgtcttcctctttgcttggaaaaacaggacccaaatttgagaggcagaggtgggcagatcacttgaggtcaggagttcaagaccagcctggccaacatggtaaaactctgcctctactaaaaatacaaaaattcactgggcttggtgatgcatgcctgtaatcccagctacttgggaggctgagacaggagaatcacctgaacccaggaggcggaggttgcagtgagccaagatcacgccactgaactccagcctaggtgacggagggagactccgtctcaaaaaaaaaaaaaaagaaaaaaagaaaaaaaaatagaacccaaagcataacaagtgctcaggtccatggtcttccaacctcatcttgctccacttaactttgattgcttcagtcacactaacctcctttcagtccctgggaaatattttgctttttcttacaacaggactgtgcacataaaattccttctacctggaatctctacttgctgccctagtcccctggccaattcactgatacttgtagttagaagctccacttcccaccctccaaaccagcatcattaagattcctgtaacacactctcaaacaaccatggtggtttgctttattattaacacccctctcacataataacattcttttctgtgattacttcctgtctcccatattatatgattgtttgcataaaggtacatgttgaagcttagtgggtgcccacatttatttacggaatgggtgaattcataaggctctgcaggggtttgtgagaacctgattacttggaaggggtagcaaaaaagggtacaggcggctagagcagatggttaggtccctagcaatcttgagagtctgtccattttgtgtaattgattcaggccttattcatcactgttattcttttttcttattcagggtctacaaaactacctattaatgatacttgcattttgcatcatcttgactggagccttatgcactgctttttctaaaatctaacaatgacaaaaccagcaggtggcagcagtagttaagagaacgcgtctatcggacagcggagagatcatgctgagaaaagagtgcattttcatatagcaaatggatctcagccactgttggagtgggtaaatgatttttttccccaaaaatgtgagaatgaaggaagattgagtttcattcaagtataaaaatgaaaatttcttctgatgaactgtttatgaaggtagtactttactgggtgactaaaatgtctacattattatagcattacatacgaggatgctctttttaccacagtatgtacctagtgttgcataatctagaacacagtatagagtccatatacaaagaagttacagtccatatttctcacctattaccccagtgaagtgaggcagaaataccttgggcgaggagggagagccttaccttctaatggaattagattccaaagatatttggatcctttgtttcataaagtaaatgcatagttggtaactaaatgttaaaaaggccattttattattgttagccaaaacttctgtttatttcaagttaatatcgcccaactctacatcatctacccattttagctcataatgcttttgattatcgccagataaagtccattctcagagaacaaaaatttttcatcattgagaaaatgtgcataacataatacatacatacacaagtatattcacgtacataaatacacacagatatgttgctaaagtgagattgtaggttatcagtaacaatttaaaggaaacaaccactcttttgaatgtacaacttttttttctgaaatacacttttctaaaaccctcttaactggaggtttcctgttttcttcttgttttaactggtggtttccagtaggcaaaataaaatgacaggcatgctagtttttttttttttttttttttttaagaaaactgaaattaagccaggcagggtggcgcactactataatcccagctgctggggcggctgaagtaggagggtcacttagcccaagagtgcaaatctgccagcctaggcaacatagcaaggtcccatctctaaaaaagaaatttaatttaaatttgtaagaaaaaagaaaactgaaacagaactgccagtacaatgtttgttgcaattgtttccaaaactttgaaataacgaaacccctattcaaatgtaaattttacccattcccacctgatagtactgtttattactttgctatgcaggagaaacaaaacagctttttatttgtgtgtatactctgaagtcaatgtgcatgggttaaatcccacctctgcttcattttatttgtgtggctttggacaagttcctaagccctctgtgtcaggcccctcattaacaaaatggagtttatgatggcatctacctcacatggttattgtgtggttgaaattagttcaaatctgtaaagtatgttgatgagtatctggtacttggcaaacactatataattgttagctttattattatgtgttgtttgaaggggaaaaaagtttttgtagattggagaacaccatgtaagagctactaagctcaccaccttcccatccaaacaattattactcctctaaatgaatactacttaaaagtgatggagcttctgtttgtttattgaattgctaatacaaataaatatttgactataacttcttatactcattttaattttaacctgaaatgtcattaaattatgctgataaactttgaataaattgtgatacaaaagctatttttctcatttaaatatattttagaattttatattggataacttttaattattctttagttgggatttccaatttatatgcaaaattttaaatgtgaagtaaagcagtttcagaagaaaaatgaaaaatcagtcttattacctctatataatttatatatatccctatatatactttgtatatatatatacacacatttatatatgtatatatatacacatttatatatgtgtgtatatatatacacatttatatatatgtgtgtgtatatatatatacacatttatatatatgtnnnnnnnnnnnnnnnnnnnnnnnnnnnnnnnnnnnnnnnnnnnnnnnnnnnnnnnnnnnnnnnnnnnnnnnnnnnnnnnnnnnnnnnnnnnnnnnnnnnnnnnnnnnnnnnnnnnnnnnnnnnnnnnnnnnnnnnnnnnnnnnnnnnnnnnnnnnnnnnnnnnnnnnnnnnnnnnagtatatagtttctggtaccaaacaagctttttcaaaatggttaccaaaaagcaacttattatttagaggctagtctaaatgggcagttgccaaatctgcattttgtttgctcaccttaggaagtgaatgcctaactctcttgagacttttaggttttatttctcctaatctagtatggctaaattctagtgtttattttacatttttctggcatggctttctgtcaaatggcaaccccatctgtactaaagagatcctgccatcttgtgtacagagacagaactacattcagtagaagtagcagccaataaggcttgtatcagattatggaaattttctaccataggaacagaaaatcctaataaattttaaaggattaatagcacagcatctccccgaactacaaaatcttcttttattcctgacatactgatttatttatattcagagttactaactactagacttataagtctcaatattgatagagctaaaaaacacattgcgtaaaggcaagttgtggaaccatgtgcatagcataacatttaggtaaatttttagtaaccaaagtaataaatactttctataaatacgtatttatgtaaaaaaaaaaaaggaatttagctactaatagtctactgttgaccagaaaccttacctgtaacataaacagttaacacatattttgtatgttatatatattatatactatatttttacagtaatctagagaaaataaaatattgttaagaaaattatagggaagagaaaataaatttacagtattatactatatttaccgataccataagtttgcatcatctgattgcaagaagaatcttctgaaatgttgggcaactgcatctgcagacctcaatctgtggtacatatcaagcaattcaactttttctaataatgtcatgacttttctctgcttcttgggagcacttccagcatcactagtcgaggtccatatgggtcccatggtgttatccaaggtttacaaggtttaattttattgcaataaaaaatgatgaaaaatatacaggaactgcaagagatcataaccaccagaggcaattgactggagagacagttgactcacctggagatgattagcaccacatggtgctttaagtggatagtcgcaacgctagagctcaccacaatagcaacggagattttataatagatttatgtatattttacggtagtaaatgataaaatagactagtgtatatatctatagtattatatatattatatatagtattatatattatatatagtattatatatattatatatagtattatatattatatatagtattatatatattatatatagtattatatattatatatagtattatatatattatatatagtattatatattatatatagtattatatatattatatatagtattatatattatatatagtattatatatattatatatagtattatatattatatatagtattatatataatatatagtattatatatagtattatatatagtattatatatattatatatagtattatgtatatattatgtagtattatatatattatatatatatattattcatcacatacacaaaaagaagtgttcacctcacttggcaagagggacttgcatgtgtcaataaggaccttaagactggaagaccctggattatccaggtggtcacagtgtaatctcaagggtccttgaaagtggaagagaagaatcagagttgagaaggagataaggtgatggaaatggaggtcagagtgatgtcctatgagaaggactaaacccatgcattgttgactttcaagatgagggaagggaacacaggccaagaaatgtgggcagcttctagaagctggaaaagagaaggaaacagattcacccctacagcctccagaaaggcacagccttgccagtcccttggtgttagcccatgtcaggctcctaacctacagaactataagaaacaacatttgtattgttttaagccactaaatttgtgataatttgttacattagcaatggaaatacagagttacatgacttttttaataataattttcaatgtaaatgtaatatttttacatcttatagaaacttagaaagtttcaaactccacatatcacttatttatctcattgctacccctctttttcctcttctttgggtacattagaaggaatacaacttttgttctggatttatacaaagaaacaaactggtgttttctcatatcattcccactcttagagtcttagaaggtttcaaatttgcaaacagagatgcattggatatggtaatgagattactgatctgagagccaaaaaacttcgatgatcctcctggccttgcctctggtaggtaacatcactttgtgaggtattttaacttcctcatatttgtaaaatggttgttttcaactaaaggaattctaaatttatgcaaacataaaactttgtcactatggagacattctagtggtataatttaatagtatcccaagttgcttcaaggttcaccttacatatttgtatcccactcctgaagtacataatgggacgggacccaccaaacattgaatagagtcacccctttgcaaactgataaggtggcctggcactctcttttttgaaatcctaagtgtgggcacttacaacgctttaaattgaggcccccaatactgataaaataggaaaagtctcattttaacatgtgactctcaaaataggtccacattttttgtgtgggttccctactcacatatggactagtaaaatccacatccatttaccttaattcaacagtatcatctgtgttataaagatgttcaagttaagcatttcacatgtgtaaatgcatttgatattcattttaaaatccatattattttgtaggtaagggaactgagcctcagtaaattgtagtgccttatttttagccatgctgcaagtatgtgacaaaatcagaactttgagtcaggattttctactctaatcatttaatattcatgaaatgtcaaccatgtgtgaggcatggaggatagagaaagaactacagagacagggctctacgctacccctcaaaaggagcctacattcagcttatggtgtcatttccttgattaagcttctcctcctcttgtctgtctcctacaatactagcccatttctccacttcacactctcattattttagacacttttgtctctcctcagagctacgggcttcttgatctcacagtacatttctgatttacctttgtagtttcccttcactgatttaggtagccaatacaacatttttgcaaaataagtacaatgaatatttactgaatgaatgcaagtaagctaaatcctaaaggcctcatttggtgctaaaattatcttgtgtctcctatttaggtttcacactgaaagaagcagtttgagaaactgcttaattaaaagacattcaaattcaagacaatttacactttcactctgtaatcattttcataatagctcacatccaattaatacagtggataaaacttaaaaagtttaatgggaaacccttttaaatactctttagttgtcagaaagaacaaaagtaaaacttgtaattcctgtcacatcttcctcagttcaaagagtattttacagttagaataaaaaaaggagccaaataaaattacttaggtttttctttttttcttgttttttttctttgaggctcaaggagtacattcacaaaaataaattatattggctcccatatgaaattatcagggatgacattaaaactaagcagccaaggaaaacatgttggtgcaggctttagtttttctctaaatagaaaaattaatattctaagtaattttgaaatttaaaatattaaatttattaaagctgtaatgaattatacattgctcccttaaggaaaaaaaaaaatatcagtacctgtaagatgtatctgacattcacaaacagtaaccacccaaaaacaccaggtttggttgctggattaagattctaaaatctgatattctgattttagaatcttaatcttaataatgtatgtctctgtgttcctaaaatttttattttaaagtgcatgacacaatacatcatgaaataattcatagactactttcttaaaatttaagtagtttaagaaatccaggaaaatattctttcctattatttttgcataaattatagcataaatgaatatccacatcctacgtatataattagtaccatgaaatacaacttgctatgtatagtccctgccacatgttaggaaagtttatgagaattgggacctctccacagaagagtcattcaactttaataactaggggaaatgttggagttaggtagttggttaaaatggaatcttcacacaaaatgaggtatctggttgtcttacctttagttattactgtatattaatcttcatttaattcatctgtaaatacattttcaaatttgaccaccagagggaagtatagggttaattatgatagtctgtggtggtctatgttataaaatgtaaactttttttaagtttgggctctgtctctccctctccttccctccttcccttcttctctctctcctgtatctctgctctcaaatgaccatattttgccatttatagattcttaaaagctgaactataaaaaaagaaacctatcttctatttcccatgctatcagtctaattgtcaatgtgatgtctgcttttcagtcatcgagttttcatcactcttttgctttattattatatttggcttttataatttcctagaagttgaagacatcacaaaacaattcaatttttagacttatttaaacagaagagtctgttcttgccctagaatattcaggacgtagaagaaggctcacagccagtgctaccaacattaatgagtgctgctgaataaatattaagctagaaggcacatttttctctgacctaaaaacaaagacatcatcactaaatgattaggctgaatggcctcaggtttctctaagatgctctagtaattctttggcttcgttagactttttaggtcacagagacctggaactatttgccctgttatttttgaagactttttgcaagcacgaggcagaaatgttttctcaatagcctactatgtcaatcatttgttgtaattggatgttcactgaatatggattcttacagcatttgccatcacttgtagactgaattgaggaagatgcgttcctatttcctgagcacagaatgatgtttcactacggtaaaagtttgacataaagtgggatagcacatgagcctgttgtttatttcagctctgaaatgcctaatggaaaatcactatgagacaaattccacaaaaataggaaaattggacatgtctaacatgctcaaatcataagctgagatattttgcagaatttttatttctctctatttacacactaaaggtcatttagaatcctgtcacctcacttacatcatcttactcatgatgcttcttattgaggatctcaagtctgaaattcaaatattatgtatgtgctgtattggtaataaaatcatcaactttaatatgggaatgtgacatactaaatatgaggtcaggaaatatataaaactaaatctcacaatgtattttaatatattttgtgtattttatgaggagtagagagatgggaaagcaacttggtattggacactttcatatgagggattttttttgcaaacaccaaagactctacatgctgtactattttatgtaaatatgtaccttttctatggctattgcaaaaattctaaatacctaatcattgcttatcttcgatgctttgtaagactgatttacctcctgaaaagatgattcaagatcataaataaaaggaagaaaatgtcattttccttaacctttatgtgattttcctgggttctgcagcccccgctgtttgacttactattcattcaggcaaacttttcagaaaaggctatgggaaatccagcagggcctaaatggcctattcttatgcaatttacttgcccatgatacagaaaagcacatcaacaaaaatgcattcatattgatggaagttcaaaactacgttaaaagaaagttccttagagaacaagatgctagctctttttaatttttcatcgttaatttatattctccatccaaattctctctggaatggacatagatttttaaagtaggtttgtttattgtttatcagtaaaacaagtttgttttaaaaacaatgacaaaaacaaaagtataaaactaaaaattaaacaccacactcattctcttccaatctctctcaatttctacctttcttacacacacacacatgcttggtcttagagattgttttctatattttattactaaaattaaaaatgcttatatattatatgtgtattgaaacatcaccatgtgccccatgaatatgcacaatatttgtcaatttaaaaaataaaataaattaaatgctgccattaatatctttgcatatatattttatacacgtgtatatatttacaaggtgacttgttagaattaaaattgttgtatcacaaaatgatacacattttaaattttgatagttattgccataatgccctgcaaaaagttgtaactaaatttttgttctgctaacagattctccacacacttgctaaaatgatttttaaaaattatttcccaaagtgatgtgatttaaatggcttctgagcacctaagtgtgtctgtatgttaatttgtgatcagaatcatcatttcttcctatgtgtatcaggtccttgtacttcctttttttgtaactttttgggtcatctcaatatttttttctaggaagttctggaatgtatacttacaatttgtaagatctctttgtatattaagaagagttattcctttacctctgatatgattttttgtaaatattctcccagttcgttttttattttggttctattgatggttaccatgcatttagttcttatatggtaaaatgtatcaaatgttcctttttaacagacaggttttgatcacactctcgagataattatgtttttaatctctattattttgttctaatacttttattttcatgttttatatttaaatatttaatccatgtggagttaattttagaataaggaataaaagtttacctttattatttttccaaactcctatcagttaaccaagcaccatttattgaataactctgcttttcttcagtgttgtaaaaaatgtttttaatgtatttcaaattataataggtacttgaatcagtttctggactgtgtaattttttgtgctaagatcatacagttataaatatactgtctctttctctctttttttaagaggcgtcttgctctgtcaccccaatctaaagtacagtggcattaccatagctcactgcagccttgaactcctgggctcaagtgatcctcctgctctacctcccaagtaactgggactgtaggcacacaccaccacatatggctaatttttattttaagagattagggtctctctttgttgccaaggctgctcttgaacttctggcctcaagcaatcacctcagcgttctgagtagctaggattacaggtgcaagccactgtattcggctcctactgtgtcttaatactgtcttaaaattgtttacctcttccactatcattattcttctatttcaggttattctaggctattacttgtttgcttttccagatgaatttaaaataagacaattaaaatttcaaacagacaaacataagagcaactgaacatctgttggttttttgataggacaacatctgaatttgcaaatttaacttagggacagctgacatctttcaactgctgagtcttcctattcaaaagtacgcaatatcgttccacatttttgttaattttttcattatactaccacagggttttctattatattattactattattttaaaataccagttcttgatttcatttgtcagtgctactgtttatctaatttttatatttctgttttaatcatttccttttttactgcatgcgaaaggttttatttaactccttagctaatgaggaaaccaggaagatccagttgaaggtgagaattcgaagaattaacatatataggcaaaggaaaactgatataaatttataaataccttaccagcaaaactgatcaataatcatcgggcaataatcaactacatctccaccagatgcactttatttgcatctctaaagataagtatcatttgtgttaatatcagttttctgcaacttacagagctataaaacagctcaaagaccatgaaaggcacaggccccaacagaatcagataaactgcagagtgcactagaaaagacacccaacatcatctctttttctttccatttcaaagtcgtatacaaatttttctaacagaaatatggggttattttctaaggtaatatatttaaaatagtcatcgcagttcttggcacatcgtggttgatgctaaaaaatcctcttccctgtctttcagtctaatgatgtcacaggaagagagatgtccttcatgcaaatgagttggaaaagtgtgtaaaataggctgtagggctcagaggtgagaatattcacagctggcagggaaggtcttcctggtaaaagggatctggtcacctcaatcctatctcttttgcttgcaacacttatcccagagaaaatcctgaagttccaatacccataccaacatttctctgtcattttacagcatatacatcatgaccacttcggtatctcttttgatacttgagactcagtactgtaattactcccattttttgaaagacgattttttagagcagttttaggttcacagcaaaattgaacagaaggtacagagatttcccatatactttcatcctcacatatgtgtagcctcctcctttgtcaacatctctcaccagagtgttacatttgttacaattggtgaacctacattaccaaatcctaatcccccaaagtccatagtttacattagggttcactcttagatgtggtacattgtatacgtttgggcaaagttataatgacatgtatccaccattatacagagagtagtttcactgccctaaaaatcctctgtgctctgcctattcatcccctcccccaccacacaccctctcaccccgggaaaccacccatcactatcttgttttagctttgttttttccagaatgtcatatcattggaatcaaatagtatgtagcctttgcagattgccttttttcacttggtaatatgcatttaagttttctccatgtctttttagggcttgatagctctttttataagtgctgaataatatcccattataccacagtttatccactcacttattaaaggacatttttggcaattatgaatacatctgcaatacacatccacgtgcaggtttttgtgtgaacataagttttcaactcatttgggtaaatatcatatagtgtgattgctagatcgcatggtaagagtatgtttagtactgtaagaaactgccaaactgtcttccaaagtggctgttccattttgcattcccaccagcaatgaatgagagt

SEQ ID NO: 802 - DNA, 3336 bp, Homo sapiens
acactggcacgtagtgggcggatcgcgccggcgctgagtaggaaggagcttcagccgccagcccggaacgcatcataggttagcttttcaagacacttcctgcatctctgacctgttgcacctctgttatcttggcacctctgttatcttagcagcaagcacctgcctcagctgacccttgagccataacccatagggcttattccaaagggccagtgtgcaaaatatgaatccaagatggcattgtggaaagacgctgtacctcctgtgataaaattactttggtggtgcttttttctcatgtatctcgggaaactaaaaatctgaattgtattcagtggccttttccaaatgaagctcctgaaaagtacatcaagtctaaagtgaaccagctaactcattaagactggaatcatgagcaacaatggagcagacctaacctttggttacatctcctgttttgtagctatccttttgtttggctcaaattttgtgccacttaaaaaatttgatactggtgatggaatgtttctccagtgggttctttgtgctgccatatggttggttgccttggttgtcaatctgatattacattgtccaaagttttggccttttgcaatgcttgggggctgcatttgggcaacagggaacattgctgttgtcccaattatcaaaaccattggtttaggccttggaatcttaatctggggatcatttaatgccttaactggctgggcaagctcaaggtttggctggtttggattggatgcagaagaagtatcaaatccgctgctaaattacattggagctgggctatcagtagtaagtgctttcatatttttgttcatcaaaagtgaaataccaaataacacgtgttccatggataccactccattaataacagagcatgtgatcaacacaacccaagacccctgttcctgggtggataaactttctacagtacaccaccgcatagtgggctgcagtcttgcagtgatatctggagtactctatggatctacatttgtgccaatcatctacatcaaggaccacagcaaaagaaatgatagtatatatgcaggggcaagccaatatgatttagactatgtgtttgcgcacttcagtggcatctttcttacaagtactgtctactttctggcctactgcatagccatgaaaaatagtcctaaactatatcctgaagcagtcctaccaggattcctgtcaggagtactttgggctatagctacctgctgttggttcatagcaaatcactctctgagtgctgtggtcagttttccaataatcactgctggtccaggatttatagctgcaatgtggggtatcttcatgtttaaggaaataaagggtctacaaaactacctattaatgatacttgcattttgcatcatcttgactggagccttatgcactgctttttctaaaatctaacaatgacaaaaccagcaggtggcagcagtagttaagagaacgcgtctatcggacagcggagagatcatgctgagaaaagagtgcattttcatatagcaaatggatctcagccactgttggagtgggtaaatgatttttttccccaaaaatgtgagaatgaaggaagattgagtttcattcaagtataaaaatgaaaatttcttctgatgaactgtttatgaaggtagtactttactgggtgactaaaatgtctacattattatagcattacatacgaggatgctctttttaccacagtatgtacctagtgttgcataatctagaacacagtatagagtccatatacaaagaagttacagtccatatttctcacctattaccccagtgaagtgaggcagaaataccttgggcgaggagggagagccttaccttctaatggaattagattccaaagatatttggatcctttgtttcataaagtaaatgcatagttggtaactaaatgttaaaaaggccattttattattgttagccaaaacttctgtttatttcaagttaatatcgcccaactctacatcatctacccattttagctcataatgcttttgattatcgccagataaagtccattctcagagaacaaaaatttttcatcattgagaaaatgtgcataacataatacatacatacacaagtatattcacgtacataaatacacacagatatgttgctaaagtgagattgtaggttatcagtaacaatttaaaggaaacaaccactcttttgaatgtacaacttttttttctgaaatacacttttctaaaaccctcttaactggaggtttcctgttttcttcttgttttaactggtggtttccagtaggcaaaataaaatgacaggcatgctagtttttttttttttttttttttttaagaaaactgaaattaagccaggcagggtggcgcactactataatcccagctgctggggcggctgaagtaggagggtcacttagcccaagagtgcaaatctgccagcctaggcaacatagcaaggtcccatctctaaaaaagaaatttaatttaaatttgtaagaaaaaagaaaactgaaacagaactgccagtacaatgtttgttgcaattgtttccaaaactttgaaataacgaaacccctattcaaatgtaaattttacccattcccacctgatagtactgtttattactttgctatgcaggagaaacaaaacagctttttatttgtgtgtatactctgaagtcaatgtgcatgggttaaatcccacctctgcttcattttatttgtgtggctttggacaagttcctaagccctctgtgtcaggcccctcattaacaaaatggagtttatgatggcatctacctcacatggttattgtgtggttgaaattagttcaaatctgtaaagtatgttgatgagtatctggtacttggcaaacactatataattgttagctttattattatgtgttgtttgaaggggaaaaaagtttttgtagattggagaacaccatgtaagagctactaagctcaccaccttcccatccaaacaattattactcctctaaatgaatactacttaaaagtgatggagcttctgtttgtttattgaattgctaatacaaataaatatttgactataacttcttatactcattttaattttaacctgaaatgtcattaaattatgctgataaactttgaataaattgtgatacaaaagctatttttctcatttaaatatattttagaattttatattggataacttttaattattctttagttgggatttccaatttatatgcaaaattttaaatgtgaagtaaagcagtttcagaagaaaaatga

SEQ ID NO: 803 - protein, 343 aa, Homo sapiens
MSNNGADLTFGYISCFVAILLFGSNFVPLKKFDTGDGMFLQWVLCAAIWLVVVNLILHCPKFWPFAMLGGCIWATGNIAVVPIIKTIGLGLGILIWGSFNALTGWASSRFGWFGLDAEEVSNPLLNYIGAGLSVVSAFIFLFIKSEIPNNTCSMDTTPLITEHVINTTQDPCSWVDKLSTVHHRIVGCSLAVISGVLYGSTFVPIIYIKDHSKRNDSIYAGASQYDLDYVFAHFSGIFLTSTVYFLAYCIAMKNSPKLYPEAVLPGFLSGVLWAIATCCWFIANHSLSAVVSFPIITAGPGFIAAMWGIFMFKEIKGLQNYLLMILAFCIILTGALCTAFSKI

SEQ ID NO: 804 - DNA, 3231 bp, Homo sapiens
aggcccatgtcaagaaggcctgagatctcccaccatcagctacagccaatttgtcagtcacagatcctcaaaatgagcagcagatacactcagtctgtaggatcatttagcaactcggggaaggaggtcataggttagcttttcaagacacttcctgcatctctgacctgttgcacctctgttatcttggcacctctgttatcttagcagcaagcacctgcctcagctgacccttgagccataacccataagctcctgaaaagtacatcaagtctaaagtgaaccagctaactcattaagactggaatcatgagcaacaatggagcagacctaacctttggttacatctcctgttttgtagctatccttttgtttggctcaaattttgtgccacttaaaaaatttgatactggtgatggaatgtttctccagtgggttctttgtgctgccatatggttggttgccttggttgtcaatctgatattacattgtccaaagttttggccttttgcaatgcttgggggctgcatttgggcaacagggaacattgctgttgtcccaattatcaaaaccattggtttaggccttggaatcttaatctggggatcatttaatgccttaactggctgggcaagctcaaggtttggctggtttggattggatgcagaagaagtatcaaatccgctgctaaattacattggagctgggctatcagtagtaagtgctttcatatttttgttcatcaaaagtgaaataccaaataacacgtgttccatggataccactccattaataacagagcatgtgatcaacacaacccaagacccctgttcctgggtggataaactttctacagtacaccaccgcatagtgggctgcagtcttgcagtgatatctggagtactctatggatctacatttgtgccaatcatctacatcaaggaccacagcaaaagaaatgatagtatatatgcaggggcaagccaatatgatttagactatgtgtttgcgcacttcagtggcatctttcttacaagtactgtctactttctggcctactgcatagccatgaaaaatagtcctaaactatatcctgaagcagtcctaccaggattcctgtcaggagtactttgggctatagctacctgctgttggttcatagcaaatcactctctgagtgctgtggtcagttttccaataatcactgctggtccaggatttatagctgcaatgtggggtatcttcatgtttaaggaaataaagggtctacaaaactacctattaatgatacttgcattttgcatcatcttgactggagccttatgcactgctttttctaaaatctaacaatgacaaaaccagcaggtggcagcagtagttaagagaacgcgtctatcggacagcggagagatcatgctgagaaaagagtgcattttcatatagcaaatggatctcagccactgttggagtgggtaaatgatttttttccccaaaaatgtgagaatgaaggaagattgagtttcattcaagtataaaaatgaaaatttcttctgatgaactgtttatgaaggtagtactttactgggtgactaaaatgtctacattattatagcattacatacgaggatgctctttttaccacagtatgtacctagtgttgcataatctagaacacagtatagagtccatatacaaagaagttacagtccatatttctcacctattaccccagtgaagtgaggcagaaataccttgggcgaggagggagagccttaccttctaatggaattagattccaaagatatttggatcctttgtttcataaagtaaatgcatagttggtaactaaatgttaaaaaggccattttattattgttagccaaaacttctgtttatttcaagttaatatcgcccaactctacatcatctacccattttagctcataatgcttttgattatcgccagataaagtccattctcagagaacaaaaatttttcatcattgagaaaatgtgcataacataatacatacatacacaagtatattcacgtacataaatacacacagatatgttgctaaagtgagattgtaggttatcagtaacaatttaaaggaaacaaccactcttttgaatgtacaacttttttttctgaaatacacttttctaaaaccctcttaactggaggtttcctgttttcttcttgttttaactggtggtttccagtaggcaaaataaaatgacaggcatgctagtttttttttttttttttttttttaagaaaactgaaattaagccaggcagggtggcgcactactataatcccagctgctggggcggctgaagtaggagggtcacttagcccaagagtgcaaatctgccagcctaggcaacatagcaaggtcccatctctaaaaaagaaatttaatttaaatttgtaagaaaaaagaaaactgaaacagaactgccagtacaatgtttgttgcaattgtttccaaaactttgaaataacgaaacccctattcaaatgtaaattttacccattcccacctgatagtactgtttattactttgctatgcaggagaaacaaaacagctttttatttgtgtgtatactctgaagtcaatgtgcatgggttaaatcccacctctgcttcattttatttgtgtggctttggacaagttcctaagccctctgtgtcaggcccctcattaacaaaatggagtttatgatggcatctacctcacatggttattgtgtggttgaaattagttcaaatctgtaaagtatgttgatgagtatctggtacttggcaaacactatataattgttagctttattattatgtgttgtttgaaggggaaaaaagtttttgtagattggagaacaccatgtaagagctactaagctcaccaccttcccatccaaacaattattactcctctaaatgaatactacttaaaagtgatggagcttctgtttgtttattgaattgctaatacaaataaatatttgactataacttcttatactcattttaattttaacctgaaatgtcattaaattatgctgataaactttgaataaattgtgatacaaaagctatttttctcatttaaatatattttagaattttatattggataacttttaattattctttagttgggatttccaatttatatgcaaaattttaaatgtgaagtaaagcagtttcagaagaaaaatga

SEQ ID NO: 805 - protein, 343 aa, Homo sapiens; identical to SEQ ID NO: 803

SEQ ID NO: 806 - DNA, 3332 bp, Homo sapiens
gtcgaaatgcacctcatgcactctaattagcacgtcaaattagtctctccgtttcagaggtgtagggcctttgtggagccttctcaataaaataatttgccactcttgaaggttagacattctcttctatcaatgtacacataaaggttttgttttgctttgcttgttgtgaattaaaatggggagaaaatgatgtgttagctatcacccagtcatgtgtctttttagtcataggttagcttttcaagacacttcctgcatctctgacctgttgcacctctgttatcttggcacctctgttatcttagcagcaagcacctgcctcagctgacccttgagccataacccataagctcctgaaaagtacatcaagtctaaagtgaaccagctaactcattaagactggaatcatgagcaacaatggagcagacctaacctttggttacatctcctgttttgtagctatccttttgtttggctcaaattttgtgccacttaaaaaatttgatactggtgatggaatgtttctccagtgggttctttgtgctgccatatggttggttgccttggttgtcaatctgatattacattgtccaaagttttggccttttgcaatgcttgggggctgcatttgggcaacagggaacattgctgttgtcccaattatcaaaaccattggtttaggccttggaatcttaatctggggatcatttaatgccttaactggctgggcaagctcaaggtttggctggtttggattggatgcagaagaagtatcaaatccgctgctaaattacattggagctgggctatcagtagtaagtgctttcatatttttgttcatcaaaagtgaaataccaaataacacgtgttccatggataccactccattaataacagagcatgtgatcaacacaacccaagacccctgttcctgggtggataaactttctacagtacaccaccgcatagtgggctgcagtcttgcagtgatatctggagtactctatggatctacatttgtgccaatcatctacatcaaggaccacagcaaaagaaatgatagtatatatgcaggggcaagccaatatgatttagactatgtgtttgcgcacttcagtggcatctttcttacaagtactgtctactttctggcctactgcatagccatgaaaaatagtcctaaactatatcctgaagcagtcctaccaggattcctgtcaggagtactttgggctatagctacctgctgttggttcatagcaaatcactctctgagtgctgtggtcagttttccaataatcactgctggtccaggatttatagctgcaatgtggggtatcttcatgtttaaggaaataaagggtctacaaaactacctattaatgatacttgcattttgcatcatcttgactggagccttatgcactgctttttctaaaatctaacaatgacaaaaccagcaggtggcagcagtagttaagagaacgcgtctatcggacagcggagagatcatgctgagaaaagagtgcattttcatatagcaaatggatctcagccactgttggagtgggtaaatgatttttttccccaaaaatgtgagaatgaaggaagattgagtttcattcaagtataaaaatgaaaatttcttctgatgaactgtttatgaaggtagtactttactgggtgactaaaatgtctacattattatagcattacatacgaggatgctctttttaccacagtatgtacctagtgttgcataatctagaacacagtatagagtccatatacaaagaagttacagtccatatttctcacctattaccccagtgaagtgaggcagaaataccttgggcgaggagggagagccttaccttctaatggaattagattccaaagatatttggatcctttgtttcataaagtaaatgcatagttggtaactaaatgttaaaaaggccattttattattgttagccaaaacttctgtttatttcaagttaatatcgcccaactctacatcatctacccattttagctcataatgcttttgattatcgccagataaagtccattctcagagaacaaaaatttttcatcattgagaaaatgtgcataacataatacatacatacacaagtatattcacgtacataaatacacacagatatgttgctaaagtgagattgtaggttatcagtaacaatttaaaggaaacaaccactcttttgaatgtacaacttttttttctgaaatacacttttctaaaaccctcttaactggaggtttcctgttttcttcttgttttaactggtggtttccagtaggcaaaataaaatgacaggcatgctagtttttttttttttttttttttttaagaaaactgaaattaagccaggcagggtggcgcactactataatcccagctgctggggcggctgaagtaggagggtcacttagcccaagagtgcaaatctgccagcctaggcaacatagcaaggtcccatctctaaaaaagaaatttaatttaaatttgtaagaaaaaagaaaactgaaacagaactgccagtacaatgtttgttgcaattgtttccaaaactttgaaataacgaaacccctattcaaatgtaaattttacccattcccacctgatagtactgtttattactttgctatgcaggagaaacaaaacagctttttatttgtgtgtatactctgaagtcaatgtgcatgggttaaatcccacctctgcttcattttatttgtgtggctttggacaagttcctaagccctctgtgtcaggcccctcattaacaaaatggagtttatgatggcatctacctcacatggttattgtgtggttgaaattagttcaaatctgtaaagtatgttgatgagtatctggtacttggcaaacactatataattgttagctttattattatgtgttgtttgaaggggaaaaaagtttttgtagattggagaacaccatgtaagagctactaagctcaccaccttcccatccaaacaattattactcctctaaatgaatactacttaaaagtgatggagcttctgtttgtttattgaattgctaatacaaataaatatttgactataacttcttatactcattttaattttaacctgaaatgtcattaaattatgctgataaactttgaataaattgtgatacaaaagctatttttctcatttaaatatattttagaattttatattggataacttttaattattctttagttgggatttccaatttatatgcaaaattttaaatgtgaagtaaagcagtttcagaagaaaaatga

SEQ ID NO: 807 - protein, 343 aa, Homo sapiens; identical to SEQ ID NO: 803

SEQ ID NO: 808 - DNA, 199868 bp, Mus musculus
  misc_feature (1)...(199868): n = A,T,C or G
tgaaggaactgtgctccctggtggcaggtgtgaaggaggccttctttgtggcagacatggctaccagtcaggaagcacatgccttgcttagaatactttttatttgtgatgtccagctccaagaataggaaagaactcgaagacagttcttgaggacaatttgctctactgagtacagcaaaataccagctactgagatagtttagttatgcattcagttcccttagttttgagatacacagtagcttgttttgcctggatattgacgtagaaggaaaaaagcaatcacgaaaagaactttgcatcaagatgaagttactttcgcttatcaaaataaagacaaatcaaatgtgtttcccaggcatcttaacattgagttggcacagttagtctttctatctcaaaccatccaaggcctggtacctctctcctcttgctttctacaatttcctgttttcccccttcaagatgctcaagagatgtaatccaagaccagttctctgctagcagcccttcccacccctgctagttcactagattcatcaaggccaatgcagggccctgtacaccagcagaaggaatgaatctaggcacagttttattccactacacttgctatatctctgctatgccccaaaacagtgactgtgcagtgggttgcatatgagtgagcactggctggaaggccacctgagtgctcaatgcctctctcaggctgtaatgtcttttgagtgacatttacttcatgctggaaggagttattcagtcttgacttggaaggccttttttttctggtttatgtagtgtgatcgagtctcttgggatcacttggctctctaggggactattactggggtagtattctttttattgaaatagattctcctctcatacaatacatctcagccactgtttcccctccctccactcctcctagtcccacacccataccccttctccctcagagccactccccctttgtttcttctgtagaaaagaacaggtctcaaagacaaaacaagatacactaagacaaggtgaagactcccatatggatacaaggcgacagggtggtatgttgttgtttaattttctttttggtgtagacaagcaggagtgcgtgtcaatttaagtaaaacctaaatcatagagactgatttacatgaaacacacacagtggtcagcctgagagcccatgctcagtctcaacactcagaaggctaaagtagatgggctgagattttcaggataccctcaaataaatcttaaatctggggttaatgtaagaagtagttacatgctgaaccatggttttacagctgcacttttaaagcactatttaactaggacacacataattatgaaaatagtcaccattgcccttttcatgctgatgtaacaacataccagatgatgttaagcaatgaatgaagaaaggagacttattcttctcacagttcttgaaagtacaaacaacacatctcctgtcctagtaaggctgtaatgtcccagggatatccctggctgagcagagaagcaatggtatgtatacaaataaggaagagcgagaaagagagagggagggagggagagagagagagagaaatagagagaaccaggtcccctcacatgacaaccacctcctttaggaaacatcccaaagctctgatacccaaccccacccatgggaccagaagcaatccattactagtagcaaagcctatacctatgagttcataagagtagacccaattgccttctggcaagcctggttctaataagcactatccccttgaagccactacattggtaccaagtttccagtacacaaaatcctggagaactaaccatatacaaactacaattcactataatcttagatttcaagaaggtcataatactagcaacttatgaaatcttccaaaggtatgtctaacattcttattttatactattgagctgacaaaaaggattcattaatagtacacaactatggtaaacatttatgcaccaaatctaggggtccacaatttcacaaaacaaacattaaagcatgagagaacacataggcccagacacaataataacagctaattctaagacctcactcacacatctaaatagatccttcttattaaaaatcagcaaagaaagattttgctgaagggaccctgatataactgtctcctgtgaggcttttccagtgcctggcaaatacagaagtggatgctcacagtcatctataggatggaacacagggctcccaatataggagctagagaaagtactcaagagctgaaggggtctgcaacccaaaaggtggaacaacaatatgaactaatcagtacccccccagagctcgtgtctctagatgcatatgtagcagaagatggcctagtcggccatcattgggaagagaggccccttggtctagcaaactttatatgccccagtacaggggaatgccagagccaagaagtaggagtgagtgagtaggggagcagggtgggggggagggtataggggacttttgggatagcattggaaatgtaaatgaagaaaatatctaataaaaatgtgggaaaaaaatcagcaaagaaacttcacttctccttcctacagcacttccttccctgcagcctggcatcgtgtgaattggcacagtctattagactgtagaagtttccctgaaagactttcctgttaaccagagctcttgaagtttgtacaacagaagacataaaattatttcacattgtaaaatttacaagtaacagacattgataaacaattaagaaatcaatcacagcattctaagcgcttggagcagtgacatagcatggatcatgaagtctgagagtgtccccaaaggattaaggacaaattccttcactgaagatactgaaaatgagtttcaaaggaaatggagagtgagagagcactaggaaggaagatcccacactagggaatgcgaaacagatgcacgctagctctagttttgatatgcgtaattgttattttctgattcatcgagaaatagatttggtatcctgaactctctcacgacagataacataaaaattagcagtgcttaattaaggtccttcagacttacagatgtgtaacaaagtatttatgaattggtgtaataaattgtttcccccactaaatataagttgaaatttttcaagcatatacttcactccataaggtttcccgaatgccagtggctaaatcaaaactatactatttggagaattttctctcattgtccagccttcaaattccaaaattttgcttttatccttaatacaaactgagggttcttagggaagttctttagaaagtgatcctgctcccaagctgcccacaacccacctgggactgtgaatcgcatgccatgcactgcagctgattttaatctccacagtgatgcatagggagagatgcagtatctaaaggaactggcagcagaacaacaaggagctttaaagattaaagtcaacactttccactgcactgaagaccgaagaggaagttaatgctgacccctgggcccaggtgtaatatcctccatatgttttagactttagctatggaagaagtgtagctctcagtattataaacaataaagttcgaagacaccatatttcgttttctattaagagtttagaagcacgagtggtgtggtataaactggacacctgtaatgaaaattgtccttgaatacagaatgttaaatagagaaatcgatagatatcttaaggtcttgaccaaagatgagctgaatagatgtccaatacctggaatcttggctcagatgtaactcactgcctagctcctaaagttacctcttcacagtggaaacatggccatatgaacagctgccgagtgtaaggaggagaatattaagccatgtacgtgagtaaaagttagttgaacactggaagatcaaagacaaaaaaaaaatcattttctctgcaagcatagtaagctaaagaaacagcccagcttgaaaaaaggctgtccttgaataaacatattaaatgcaaaaatcttactggaagcactaaatcaaacaagccgagagcacccctgccaatgagagaaaactctccaaatagtacagttttgatgtagccattgccatgtgggaaaccttgtgtactaaagtatatgcttgaaatttttcaacttatatttagtgggggaaacaatttattataccaattcataaatgtacaacagatggaatgcttctttttcagctcttggcaaagccttctattggatgaatagtctttggttcttaaaactatggccatcatcattcacacctattttcttaaattaaacagaccaattccatgatgaaatcgcctataaatttggttaccatagaatgccttctcattctgcaccataaattatctagaatgccacttgccttgaaataatgaagggggccaagcgggccgaaaggcattctacaataaaaaccattgggattccttaagtcaattttagaaaacccttcatattgcaatttattctggtagcactttaccataaatgattccactagaagtgtgttctttcatcctgaaccatgtacttggatcttttaaaatgcccacttactctaagatgttagaaaaattgtaatttaaatagatagatagatagatagatagatagatagatagatagatagatagatagaagcaatgaatatcagtttgtattctttttaaaaaatgtatcaaaaactgtcctggatatatgtgtcataaggtaactgagtttgatgcccaccagttatttaaagtaagaaatgtatcaatggataaagaagccaaaggacgtctgctccaagctggtgaggggacaggggaatgggaccaagcctagaagagtagcactagactttctatctatcatggtagctagcattgcccactgtctacttgaaagaagcaaaattggttcctcgggctgtttctctcaatgaaaacatcaaaaatctttagggtggtatcatggttagttttaggtgtcagtttatcagaaccttaaaactatgtaggaaagggatctcaatgaagacttcagttatctagatcaccttggtctgtaggcatatgtgccaggttgtcttgattgttcattaaagtgggaaaatctactctgaatataggcagtctcatttcatgggctgggccctgaactgtagtagaacagagaaggcgagccaggcttgaaacaataacccaacaaagaccagcacatctgattttctatctgctcttgactgaatatgatgccttatgttctggctctgacttctcctcagtaacagactgtgacatggggctataagctgagattctccctattattcccctaaattgccttatgtcagggtgttttcctacaacaacagaaatggaagtagagctaatgagatgattagcaaagcctagtgattgtagacccagtgttttacaagtttaaagagaagtcattgctcatccactcactggtctaagtaaatttgttcggtgtgggaaaggttggaagagacctctgtaccttagcaatcatccagtcaagaacatcagtaccatggtatctagacagatgggggaaatggttttaagggtcaagcccacattctaaaataggtaattctactactgcctcctgttggcaagaactcagtcaccctttcataggtaagaataaagaaggctggaaaagccatctcttgcagtgggaagaaagaaaaggagatgctttctgaaaaacagttttattctgataaatattacaaacacttaattgctgctaaaatcagagttgtagttagagaggtggctcagcagtcaggagcacatgttgaccctgcaaaaagacaggagtccaagtctcagcagctacatagtgaatcacactcatcctcaattacagttccaggggatccagtgacctcctctcacctctgtggacaccaggaataagtgtggtgcactcaacaatgctctggcaaaccactcacacacacacaacaatatttttttgttcaaactagtttgtaaagttatcacttgttagaaaaagctacggcttgtttctttacaatctaaaaacaacacttttagttgtaaagtctccatttccatttttctcttcttgcttcgctctcttatgtggaacccatgttgttaatcatctgctaatgacctggcgggatggctggtaagggaggagctttaccttgtggtgtgaactcacactcaagaagaagtgcaattagcagtaaaacatgacacataaacagtagttaatttttaaatggaacatgagcttaaatgccaataaatgtttttattacttcactcataaaagcacagttctccaagcagcttcaactagaagaaatatgaccaaaatttagactgatgtcatcagtctgtaagaaatccacccttacttttaagcaattatacaaagacagtttttatccaataacattaagaaacggttggtgaagaaggaagggctggagaaagggccatgagaatgagtgagcggcagactcattagttgccatggagatcctcatgaaaactctcctctagcaaattcctctgacatcaccactcctcggtcattttattcctgtaacaatgtaaacgtcacaagcgtaaatgtcacagagattgatgtaagccccttcccccaaaataaagtatacatattataaatactatattataaatgtattttactatattttaatataataccatattataaataagtatacatattataaatacttttttaattgtgaaagattatttttgagaagggttttttcttcagtatctgtatcaaaagggaggggattgctttcttcaactagtacaagttatgaacaaaagttaaaatggaatgcgatcagcaaacctggaataggacaacggggatcagctgttaccactgaccaggcagcttccggtctctgtgacaaagcacttgagataagcatcctcaggatttattttgccacatggtgtcagaaactttctggtcacttgggccagtccttttcagcctgtgacaaggcagagaggaatgtcacagtcggatgcaggtaatagaagaagcaatgagagacaggaagaagaccaggtcccgataacccattcccaaagaccccactgggctctgcctcctaactttttaccccctctcaatagcgccaccatctggagactagagccttagcatataggctttggaagccattgaaagtctgaactcataccaagtattcactccatggtcccagcactcatgatttctttctcaaagacagagtcagaagcagcgatcatgtaggttgtgctggacagagcacagcaacaggccacaggcagagcctgtcacccttggctggctgaggtaataaaaaaccactctaggtgtgtgggttcatttctgggtcttcagttctattccattggttggtgggattgcaggcttgtacaaccactctggtaatcagtctggcagttcctcagaaaattggacatagtactaccggaggatcccgcaatacctctcctgggcatatatccagaagatgtcccaaccggtaagaaggacacatgctccactatgttcatagcagccttatttataatagacagaagctggaaagaaaccagatacccctcaacagaggaatggatacagaaaatatggtacatctacacaatggagtactactcagctattaaaaagaatgaatttatgaaattcctagccaaatggatggacctggagggcatcatcctgagtgaggtaacacattaacaaaggaattcacacaatatatactcactgataagtggatattagccccaaacctaggatacccaagatataagatacaacttgctaaacacatgaaactcaagaagaatgtagactgaagtgtggacactatgcccctccttagaattgggaacaaaacacccatggaaggagttacagagacaaagtttggaactgagacgaaaggatggaccatgtagagactgccatatccagggatccaccccacaaccagcttccaaacgatgacaccattgcatacactagcaagattttattgaaaggacccagatgtagctgtctcttgtgagactatgccggggcctagcaaacacagaagtggatgctcacagtcagctattggatggatcacagggctcccaatggaggagctagagaaagtacacaaggagctaaagggatctgcaaccctataggtggaacaacaatatgaactaaccagtaccccagagctcttgactctagctgcatatgtatcaaaagatggcctagtcggccatcactggaaagagaggcccattggacaagcaaactatatatgccccagtacaggggaacgccagggccaaaaaaaaaaaaaaaaaaaaaaaaaaatgggaatgggtgggtagggaagtggggggaagggtatgggggatttttgggatagcattggaaatgtaattgaggaaaatatgtaataaaaaataaataaataaaccactctagacaccaggagtggtttggtgataagcaagcgtggctcagcactgtgctttgtatagacggaggagacagagaagtaccttgtttgagatctggtttttattacctcagccagccaagggtgacaggctctgcctgtggcctgttgctgtgctctgtccagcacaacctatatttgtcccaaggaaacttaagaaaagttaaataagtaggaccaaggaaatagcacagttggtaaagtgatcgccatgcatgcatgcacacttgagttcaacctagtccccagaatccacattaaacagccatgtgggaagataacgtgcttgtagtcctagccctggggagatggaaatgggcaaattgcacccctcaggctcactgctagactagcctattcagcaagccctgggctcctaaagaacctgtctcgacaagcaaggtagacggcctccacatgcctgtgtaccctgtttcatgtatacctaccttcacacacatgaacaagtacacacatacaaataaagtaagattggatagctcagtgctaaagtgtactcgctgctctttcagaggacctggggttcaattcacagcacgaatctacagtcgttactatgatgatcatcattttgcagactcagtctaactgtgatatcttagattagtttgggttagaaaaggggggggggtactctgcttgccaatgggataccctttagagcatgggttctaaatctgtgagttacaaccctcttggtaaagctctgtctctaaaatatttatattatggtttgtaacagtagcaaagttacagttatgaagtagcaatgaaaagaatttatagttgggggtcaccacaacatgagggattgtactgagtcacagcattaggaaggttgagaaccactgctttaaaaaaaaaaaatggagctgtttaggcagagcagatgaaatacagagacaagaggtgagatgaagaagagaaattcttcttcctgtgtggaagagttctggagattagaggttgaaaactgactaggctgtcattctcaatgctaggttggctgcaccagaggaaacttggggcggggaagcctgaatgagtaattttgagtttctacacattgtttattcggactagactttgttcccaagagaaacagaggagaaatgataaaagaaattagtaagccagctcgacccgctggaaaaatcaccagatataccctggtatttctggagtttggcacttagccactctgctactatggaaacggggaagcggttgacttgagggtccggaaccggtttggggggaagggagcgagatccgttcaggaactgggcgtggtctcggttaccaaggcctcagagacgctcaggcctggcctcagcccagttttgaggccaatgaacctcccatccttcgcatggcacccaagaaggagaaacctaccgggagcgcaaactataagatatgggaaccttccctcatagctgcacacttgaaccaggtgagcccggcctctcaagtccctctagtccagggagcctggagctctctgctcagcactgctctcccagatctgccaggtgcttgacaaaggagtgagctagagggatggggctacaactcagtggtggggctgagggaagaccctgggttcagtttgcagaaccagaagcaaaaacaagacaggaagggaatctcagccctgccatttcaaaatggggtggtagatctgtgtgaggagaacgagaacggggttgtcattatgactcctgagtccccctttcagtgcaggcaggcttccagtgcttcccccctgccccccttgtactgggactgttatccttgtgaactgtttccttcctgtttgaccggttgatccccccttgtactgggactgttatccttgtgaactgtttccttcctgtttgaccggttgatcattcgtatcattcgtggccccgcccacagcaatattttaattaatgctggatgtaatcagccaagacccagaactacaatctgtaaaaatagaaagatctctagaagaaaatgttcttatgtgatggcttgctctgttttggtctctgttgctctgataaataacctatttcattttaatgtttggggcaggaactagaagcagaaacccccgcaggaatcctgctccctgactctggctcatgctcagctagcttttttatacaccaccaggccacctaagataatgcctgatacaatgggctgggcattcctccatcaagactctctcacacagacttggccacaggcccctctgagatgcacaatccctcctttgagaccctgtcagatgactacaggctgtgtcaagttgacagctaaacaaattagaacatactccatacctctgcatccaacgttttcatctgggcatggagagaaagctcagtggttaagagcacttgctgctcttgcagaggaccaaggtttcattcccagaatctacatggtagctcccaactgtctgttactccagttcctggggatgctgtgctctactctggcctctgtgagcactgggcatgtatatagtacacatacatttgtgcaggcaaaacataaataaaatacatatatacaaaatactcatacatataaaatacatatacagaaaacaaaacagggtaattgcctaagaacattttctcctaagtccctttctatttttacagattgtcaccttgggtcctacctgtttacatccagcatttatgaaaatattactgtgggcagggccacaggtgacttggtgatatagcagtcaaacagaaacaggagctggagagatggctcagaggttaagatcactggctactcccccaaaggacttgggttcagctcccagcacccacatggtgggtcgcagccatcgtaattctagttcctaggaatcggatgtcctcttcctgttatcctgagacacctggcatgcacatggtacacagatctacacacaggcaaaatagtaagtagaaaatcattgtggaggcctgggtgaaggaggtcagcacctcagcactggtgttgcctgcctctttagcagcctggggtcgtgccagttcccacactggacctgcacagggaaatgagagatgtgttggaatgtgtagccagcccctcgggagccacatgcctgccttgtaacttctctgggcaacctgaagaccttatggattggtgtagtgctgtcttctattcggctatttagaaggtgtagatccgaggagctatccactcattgcacattgccacaaatgcacacagcaatctgtgactcaaaccagagggcccagcagcacagtgacccaggccccactcacctccacctttagtgagaaacccaggggcttctggcaccagcaggtagcaattcatgtctagactctaacatttctaagtccaagtagagatctggggagagaaaggccatttgcaggcattccagcctgccattgggactgtcttgtaaacgtggagaatcgacttggttttgtttttgttttttttttatattttatatatggatacatggttcactagagagtttgtagttaaggaaagtaaaatggaccttgtgctgccctctggggaaatgctgcctatttatccttattttccaatgtaattgtttctttctctatggaaagtaattctatctgagatgaaaattagtcctggtgagtcgtgtgaaagtagcctgaccctcctgttgccgctgtggcttcatgcatcgttactgtgcctcttctgcagggtttgaataactcaaggaatgaaggctgtcaacctcatactccccagctacattctcaaattctcagagatgtttgtcaaatcaccctgcaaaagtaccttctcttttacaagtcagatctagccaaaataatttaaaaaaaaatttttttggagatgatgttggtcacactgggcttggagcaagcatttctgctggaattctatgctgctgaaccacaggcttcgtggggacactgactctgtgtttgttagtctggtgctgcaagcacaaagctgtaattttcctagtggaactgaaaacccccaggcactattttttcttatagtttaaaaacatgaagtaatattcggccttcttaaccctgttcaaataatataggttcaataaatcttctatactggtagatataattgcaagtcaaagtaatatgtcactttagctatgaagggaatgagctcagctttcagtttgttggaatgcgtgctttcttattgttgggagaaaataaatatcttctacgtacttccatattttgttagcttggttttgtgcctgtaaaggagaaaatcctatcagttaatgcctaaatgcatgttccaaccgtgagaataaccaactctgactttggccaaaatgactatgcttgtgtaaagtccttgttcattgggtttggtaaggagcatcacatgtggtacgtctgagaataaggtattgttttaattcattaagagcttgttattcttttacaagtatatgtgtttgaatgcacctgtgctaatgtgtgtaacgaggtggggcatggaagacaatgtagtaattctctggtattatgaaagatagttttcaaattacctcattgaagaatccaaatcggtaatcgttctgttcttactctgagagcagcctgcactggaatttagcagaagcatcaagttcccagtttgactttggtgaattatcctcatttccttattatatctacaccaatcaattaatagatgaattgattaattaatttgttgattgtttaattgattgactggggagctggcctttcgagctggagttcttgccaacgtcccagtacattttagttgttcctgaaacataaatggtgacaagtaatagaaggcactattcttatcatcttataaaagaaaaggagttaccaagtattcagtgactaggagagatcagaggatcagaagaccactggaaaactgggtaatgttagacatgtagggtaaaggggaaattagtttgagtgaaaagaccaacatcaactgaaatgcttgaacagagacagagacagagacagagacagagacagagacagagacagagacagagagtaagcaaccaaggccccttttgggtgtacattgctcctgaattaagtctgcaaacccaactatcattgacagtttttgctgcccatctgccaagacacttattaacacatataaaacatgacaccttaaatctgaaaagaaaaaatgtttggatgcattggcagtaagattctacaagtgacaacagaggtctgtgtgtgacattgacacaagttgatctaccatggctttggcagcccaaagatgctgtgctgtagacattccctcttgacccaaagctgcacttcttaagatttcagctatcctcagccacctgtgctctgaaagcattaagcagacacttgtaactgttacactgcacagctttctgagaggcaccatccaatctcgtaccataccccctccaccccacctatgacatgagccatccttttgtccattgtgacggcagtgcatatcgtttgcacactggcctcttcagagccatccagtgtatcaaatagactgttgtgactgacacttgttgtgcagtgcacaagggttcaaatttcaccatcactgcactcggccctggcctcaccgtgcacgggtagttatgatggtgatttgggtgtgccaaaaggagcagagaagtgcttcctatgagtgaaaaggaaaatattattgatttaataaggaaaaaatggtaggttctgaagctgactgctatgagaatggatattctctcagtcaatttttgggaaaagggaaaagaaagacatgattactgttaagactgaaaaactttcatctccatggtaaattgcttagctgagacagaaaagacagtaggttatgggttcaacactatccacatggtcaggcagctattagagtcttagaatatatatccatgtaacagagactatcctataaattaaaatatttccatacagctgtcaaggcagaggccattggccactatgatgggaaaaagatgttaacatgtctattttctgttattgaaactcttttgactagctaataatttacaaagaacagttttctttcctatatatatattaaaaaccatcaaaccctaaaacatggtggcagcttccagcaagagccctggctgtgccataatatggtggagggtgtcccatatggaagtatttgaaagaaatgaataggactgaactgcttttaccaaaggctaccccatagcacttaagctactcctggggatggtattgaatgaaggtgatgtcaacatgaccagattgtctctttaattttatatttttcatgtgtttgcattatattacatttcattatgagcttttggcatgtggagaccataatatcaacctctagaagctgccattcctcctcctgtctgaaattgacttctaaatgtgttttatataggtataatcatgcagcatgtgtcttgtataactggtttgttttgcttagcatagtatctttgatggcttttgtactgtgggttagaattcctttactttaggatccatactatggtcacagtgctccatacccaaataccacttggaaagagctggtctcccaggagtgccaacacacctgtaagcacaggtaagactaccacttccactcaaattcctggcccaagaggatcctttcagaaccatcaggacacagaaaccaaggaacaacccgggacaggatccttctggtttccatctgcactccggagctgaccctgtaccacagctcttcatactcaaattcctccaggagagaactggtctcccaggagtactgacacacaagtttgcaggagggaagagccacagtcagagataataagaccaactgacaccagagaaaaccagatggcgagagtcaagggcaagaacataagcaacagaagccaaggctacttggcccagaacccagttctctcactgttgcttctgtctccaaccagcagaaaagagcgatgacacagcgttcttctcaaagcagtttattcaggaacctttcaacatgcaagcaggaatctcctctagcccccaatcgcaatcccttaatcccagcactcaggaggcagaggcaggcggatttctgagtttgaggtcagccaggtctacaaagtgagttccaggacagccagggctatacagannnnnnnnnnnnnnnnnnnncaaacaagcaacaaaacaaacaaacaagcaatcccttatataacccctcaaccacaccccatcagcccagtctgagtaattcattggccttcgtcaaatggcctgatcttgcatcatggtgcacctgcgcagctcttgcgatggtcatggctaattttcgggtgtatgaggaagtcaggtgcaagtcataagacttggctgcagtcccgggtgccatcttgggactaccgccacacccgctccccacatctcccccttttttcttttttggcagagagaatgcctgtcttagtttgccccctgcagcaatgccccttacccatcattgggagacaaacagctttggtttgatccctgtcttaggttggtgacacgcccagggagtcttacctgtcattgactacttctctagcatgccaagccacttgaggagactgtcctgtctccaccactgcaaaagcctgtatcatcaaggcttgggttctgcactgacaaaactgtatacggcaaatgcaccaaaagggcaggatgctgattaatatcagacacagggcaagtccaccaattctggcccactcgtttaagtgggagacagctgtagatccagctggccagtctttagccatggacatatccacacgggtggagttaatatggacgatggattgtttcaattccaaaactagtccatcaaaatgccatcaattccctgtaaggtactgagatatattgcaggataaattagcagcatgactggcattcacaaacggtataggtgtaacacacagtcccgaatatttccactcacaaccccaattgtgctgactccatcaaaacatccacttcttcctggactaaatcaaccctttgattcagcaataaaattcctgctttcagctggctattaatatttccctgaacatccaaagcttctgcaacaccagcggataaattattcacagccggagcagtttgtaccacagagataagggatatggccgcagccatggctgtggtggcagaaattgctatagcagtgacaatggccacagtaacgccaaaattccctcttaggtctaaacaaagtcatagcaaaaggagcttgaacaggccaaggtacaaagcgaggcatcctagtcataacagctaaatgatattcagatgcattccagcacatactataataacaaatatcactacttcaattaacaacattattctcataactaccattataaacaataaacacaaaaggaggccacaaacaaacaggcatagccttaaaggaagcattgcgccctccagcaagttgagatacagaggtttcatatacactagacccattccaataaaaatcttgcattaccccatacccctcccactagcatactcagaggagaaagatctgtgcaactaccattcacaccacacaacaaccacacattaaaaggattactagctcctacttgaactggattttgataggtccaattatatcctgaaaatgagctattatggactgtgccaatataaggagaaaacataaaatgtttcttgacagcccaagctgcctttctagactgacacccagtccgtggtggaagggaatcacgggaacctttgcaaaagggagcccatttaggttggagaggtatggtatcattgcctttggaaatactggcaggccacaccccttgaatccatgtgtcattagctttagtagaactattaattggcatatcgaaccacgctgctgtttgattatacatttgaacgcagccactattctgagaaatatcttgaatcatttgaaagcacagcaatcccctcaactgaagctgcatcggttcctggacaggagctatttccccatcccatggtaaaatagggtaactgcagcaaagcattagatgtggaaaatcgagggaacacttgtgccaaatgcatcaacagcatgggtttgggaaacacagataagattccccaatgtggatctccagtcatcaccacgggaagtatcctcaacaccaggaacatccacgccgtccccactcctctcattttggactgctctggtcaaccgttctgggacccacagcggctgtcagtgatcctgaggaaacacacaaacagaccctctcgcccaaaccaacactgaatcagggcccttccaacaaccagttaagacatccttccacatgaccatgccttttggagaaacatcaggatcaatgtgacactcggctgtgacctgtccatgtttgtcttcattcaaaaaattcaaggtaaaaagggcaatggctaatctctccctaggggtggaaccaacagaggcaattccccccttttgtttaattaagcattcttttagggtgcaatgggctcgttcaataatgccctgaccctgagggttatagggtaacccatgggtcaatcagacacccatcattttaccaaaagaaacaaaagaggcagaagtataagtcggcccattatcagtctttaatcctttaggttgtccccaggcaccccaagcttcaaagcaatgcgcagtcacgtgacatgccttctctcctgtatgcaaggaggtaaaaatgacaccagaagctgtatctatggagacatgaagataatttaactttccaaaatcagagaaatgggtaacatccatttgctataggtgcaaggggtgcaatccacatggattgactcccactcctatctgagacaataatggggcacatgtttggcacattttcacgatatctctcacctccatccgagaaattttaaatcaggaggataaggttttggaattaacatgaaactgtgaatgaaaatcacatgccaaatcaataggtgaggcaattaaaaaggccatgcgtgccttagaagctttatctacaatatcattcccttctgcaaggggtccaggcaatccggtatgagcacgaatatgttacacaaaaaatggtgaatgtctattcaagataaaatcttgcaatgtaagaactaatttcattactattctattagttactaatagattttagattaactttgcctaccacctccaaacattgcaacatattaacaacatattaaaacatattaaaagggcctggaattaattcaaacaccttaatcacaatttgcaattcaataacttgtggtgatgcggggggggggggagattgtatggtaactggtgatgatcctgctactaaatatgctccatatcctgtcttagaaccatctgtaaaaataagtgtagcatccggcaaaggattttttgaagtagcatgaggaaaaatcacaggatgaactttaatcaattgtaatattggatctttgggaaaatgatgatcaaattggccctgaaaactgtacctcaaaatggcacaatcatctactgtagctgatagcacttctagctgtttaacattatctggaactatcaaatcctctggcggaatgccaaaaaattgcacactttgctgaatagcaagcaaagccaattgagccactgaggcgggataataaacaagtgttttggctggggaaatctttggatgtatccagagcaagggagctccttgccataagacccccattggttgtgattctgttggcaaaatacacaatgcaataggctttgacgcatctcggcatttcaaggcagcatcttgaatgatctgctccactgaaagtaaagccgctctggcagcattagtaagatatctgggagaattcaaatctgtattgcctggtagaatatcataatggctgcaattatttattggttaaagacaaatagggtcagacccattgaatatctcccaataatttttaaaaatcatttaaggtacataaattatctgtgcgaatttggatcttttgtggggacaccaatcctgcagttatttttgttcctaaataatttactactatatccttttgtaccttttccggggccactactaaatttctttccttcaactgtgttaccacaaagctatacacttcatcaagtaactcttccatgggagcagcaataagaatgtcatccatgtaatgataacattttacctttggaaatctctttctaacctctttcaaggctgtatcaacatatagttgtcacatagtaggactgtttgccattccctgtggcaaaaccgtccattcaaatctcctatcaggtttagcatgattttgagaagggacagtaaaagtaaacctgactgcatctttatggtataaaggaatagagaaaaaaatctttgatatctaacactataatgggccaattcctgggcaaggcagaaggcaatggcagccctctctgtactggtcccattaaaatcatttgcttatttatttctctcaaatcatgtaaaagtctccattttcctgattttttttctttataacaaatataggagtattccacggagaggtggagggttgtatatggcccaattccagttgttcttgtactagttcctgtgcagccttcaatttttctgagggaagtggccactgaggaacccacaccggatcctcagttttccatgtgatcggtaatgctccctcagtggcccctaggaaaaacccaacccagcacgatcattctctctgcagatcagcactgtggaggctcttccttgtaaaaagcgacctagcccttttctggggacatagcccatatccaacatgatatccaaggccttggtgctgtagcttccttcattagttaaaataaagcccatctccttcagcagatcacgaccccataaagacactggaactgccaatacatatggctgaaactggccagaatgtccctctccatccctccaatttaggaggcaagagctcatttccagcatttgagcatatcccagtcctcttaaagtctgctctgactgttgcctcggccaaccagagggccagtccttggtactaatgatactacgattagcacctttatctaggaggccagacatggactttccttcaatagaaagctttaataaaggttgggtatcaagatccaaagagcaaaaaacattagaagtacctgttgagccaaagcccttgtcctgaattttttctccttgttctgaatcttttgcaggaaattgagaatgacagctagataaaagaagcaattgagctatcctatccccaggagaaatggcaataatgcctctaggggaggataccattatcttaatttgtccggtaaaatctggatctatcactcccagatgaactattaatccttgcatagtaaccgagcttcttcctaaattcaaccccactgtatcggccagtaatgggtctttgaaatctgtatccaccagctgtgaggttaatacgagtcaggtggcagaactgaggtcgagtcccgcactccctctcattgctctcctgggtgattccattgcattgggagtctcaaactgggccatcccttggttagtaccccatatatttgcaggccttggggtcgggagcccctcctcaagttttttggccgagcaccaccatttccagaatcaagaggcagtccatgaatatccttaactgatcgacaatcactggcccaatggttcccctttttgcattttgggcacagcccaggcatcttaggccactgatttcctgacccactcagctgtgggcattggtgcttcatgtgacctggctgcccacacttaaagcacttattgttcttctggccaccccttccttgggacatctgcatgacggcagcagccagaccagaattagagagaggccctcctagttctctgcatattttcatccaaacctctagccctttgtgtttatatggattaattgtttgcctgcattctttagtacactgctcaaaaatcagctgcttcaacaatggcatagcagtatcaggatctccaaacacctggcttcctgcctctactaaacgagccacaaaatctgcacatggctccgtggggccttggacgatcttggttaaattcccactcacttcccctttcaggagttctgcaccacatctttctctatcttctatgcaatttctcactaacttccagaccagcaaaaccccttttgataaagccccctgttcctctgcaaacctcaagtctttccctagtttttcccaactgggcaccataaaatgtcctgacaagggaaaccatggagaactatggatgaaatgggcaaatttctagacagataccagttaacaaagttaaatcatgatcaggttaatgatctaaatagtcctatatcccctaaagaaatagaagcagtaattaatggtctcccatccaaaaaaagccaggaccagatgggtttagtgcagcgatctatcagatcttcaaagaagatcaaattcgagttcttcacaaactattccacaaaatagaagcagaaggtactctacccaattcattctatgaagccacaattactctgatacctaaaccacagaaagacccaacaaagatagagaacttcagaccaaattcccttatgaatatcgatgcaaaaatcctcaataaaattctcgctaattgaatccaagaacacatcaaaacaatcatctatcctgacatagtaggtttcattccagggatgcagggatggtttaatatatgaaaatccatcaatgtaatccattatataaacaaacttaaagacaaaaaccacatgatcatctcgttagatgctgagaaagcatttgacaaaattcagcacccattcatgataaaagtcttggaaagatcaggaattcaaggcccatacctaaccatgataagagcaatctacagcaaaccagtagccaacatcaaagtaaatgtgagaagctggaagcaatcccactaaaatcagggagtagacaaggctgcccactttctccctacctattcaacattgtacttgaagtcctaactagagcaattggaaaacaaaaggagatcaaggggatacaaattggaaaggaagaagtcaaaatatcactttttgcagataatgtaatagtatatataagtgaccctaaaaattccaccagagaactcctaaacctgttaaatagcttcaataaagtagctggatataaaattaactcaaacaagtcaatggcctttccctaaacaaagaaagaacaggctgagaaagaaattagggaaacaacacccttctcaatagtcacaaataatataaaaaaaccttgtcgtgactctaaggaagtgaaagatctgtatgataagaacttcaagtctctgaagaaagaaattaaagaagatctcagaagatggaaagatctcccatgctcatggattggcaggatcaatatagtaaaaatggctatcttgccaaaagcaatctacagattcaaagcaatccccattaaaattccaactcaattcttcaacgaattagaaagagcaatctgaaaattcatctggaataacaaaaaacctaggatagcaaaaactcttctcaaggataaaagagcctgtgggggaatcaccatgcctgacctaaagctgtagtacagagcaattgtgataaaaaactgcagggtactagtatagcaacagacaagtagacaaatggaatagaattgaagacccagaaatgaacccacacacctatgatctcttgatctttgacagggagctaaaactatctagtgggaaaaagacagcattttcaacaaatggtgctggcacaactggcggttatcttgaagaagaatgcaaattgatccattcctatctccttgaactgaggtcaaatctaagtggattaaggaactccacataaaactagagacagtgaaacctatagaggagaaagtggagaaaagtctcgaagatatgggcacaggggaaaaattcctgaatagaacagcaatggcttgtgctataagatcgagaatcaacaaacgggacctcataaaattgcaaggcttctgtaaggcagaagacaccatcaataagacaaaaggccaccaacagattgggaaaggatctttacctatcctaagtcagacatggaattaatatccaatatatataaagaactcaagaaggtggactccagaaaatcaaataaccccattaaaaaatggggctcagagctaaacaaagaattctcacccgaggaataccgaatgactgagaagcacctgaaaaaatgttcagcatccttaatcatcagggaaatgcaaatcaaaacaaccatgagattccacctcacaccaatcagaatggctaagattaaaaattcaggtgacagcagatgctggcgaggatgtgaggaaagaggaacactcctccattgttggtgggattgcaagcttgtacaacaactctggaaatcagtctggcggttcctcagaaaattggacatagtactaccaaacgatcctgcaatacttctcctgggcagaatccagaagatgttctaaccggtaagaaggacacatgctccactatgttcatagcagccttatttacaatagccagaagctggaaagaacccagatgcctcttaacagaagaatggatacagaaaatgtggtacatttgcacaatggagtactactcagctattaaaaaatgaattataaaattcctaggccaatggatggacctggagggcatcatcctaagtgaggtaacccaatcacaaaagaactcacatgatatgtactcactgagaagtggatattagcccagaaacttagaatacccaaggtataagatacaatttgtaaaacacttgaaactcaagaagaacgaagaccaaagtgtggacactttgccccttcttagaattgggaacaaaacacccatggaaggagttacagagacaaagtttggagctgagacgaaaggatggaccatctagaggctgccatacctggggatccatcccataatcagcctccaaacactgacaccattgcatacactagcaagattgtgttgaaaggaccctgctatagctgtctcttatgaggctattcttgggcctagcaaacacagaagtggatgctcacagtcagctattggatggatcacagggcccccaatggaggagctagagaaagtacccaaggagctaaagggatctgcaaccctataggtggaacaacaatatgaactagccagtaccccccagagctcgtatctctagctgcacatgtatcagaagatgacctagtcggccatcagtagaaagagtggcccattggtcttgcaaactttatatgcctaagtacaggggaacaccaaggccaagaagtaggagtgagggccggaggagagtgtgggggggggggggggaggacttttgggatagcattggaaatgtaaatgaagaaaatacctaataaaaaaggaaaataaataaaaataaataaaaatcacatctcatgattataatcgaggactttaagaaggacataaataactcccttaaagaaacacaggatgcataccacacttcattgaaccacctatccattggtgaaccttgggtgatatccttccatgattagtgtggatgctgctgtgggttatgtaagtgtacaaatagatgctccagtgtgggagaatcgagggtggggaggtgggtttgggtgggtgggaggaacatcctcatagaagcagggggagggaggatggaatagggggtttctgagagcaggggaaaccgggaaaggggataacatttgaaatgcaaataaagaaaatatccaataaaaaagaaaaattatgtactagggttctttaagttctgaaaatctgtggattagctgcatcatctggcagatacatttgtgttttgttgttagtttggtttgattttgttcttattgttgtttttgcttttattttgttattgttgttattgtttaaagagttcccacaatggctaaagtttacaatcccaccagatatgtacaagagattcaagttctctacatcaccaccaatgtttgtactgttctgcaggctgttgctgttgttgtttgagggggatggatttttctttgatgttatttatgaaaatcatcctaactagtgtgaggtgatgtgttccttgtgtttttagttacaattctctaatgattaacaatgcattattaaagtccttctcagtcatccatacatcttttgtcaatttgttttttttttccattttttattaggtatttagctcatttacatttccaatgctataccaaaagtcccccttacccacccacccccactcccctacccacccactccccccctttggccctggcgttcccctgtaccggggcacacaaagtctgcgtgtccaatgggcctctctttccagtgatggccgactaggccatcttttgatacatatgcagctagagtcaagagctcaggggtactggttagttcataatgttgttccacctatagggttgaagatccctttagctccttgggtactttctctagctcctccattgggagccctgtgatccatccattagctgactgtgagcatccacttctgtgtttgctaggccccggcatagtctcacaagagacagctacatctgggtcctttcagtaaaatcttgctagtgtatgcaatggtgtcagcatttggaagctgattatggggtggatccctggatatggcagtctctacatggtccatcctttcatctcagctccatactttgtttctgtaactccttccatgggtgttttgttcccactactgaggaggcatagtgtccacacttcagtcttcatttttcttgagtttcatgtgtttaggaaattgtatcttatatcgtgggtatcctaggttttgggctagtatccacttatcagtgagtacatattgtgtgagttcctttgtgattgtgttacctcactcaggatgatgctctccaggtccatccatttggctaggaatttcataaattcattctttttaatagctgagtagtactccattgtgtagatgtaccacattttctgtatccattcctctgttgaggggcatctgggttctttccagtttctggctattataaataaggctgctatgaacatagtggagcatgtgtccttcttaccagttggggcttcttctggatatatgcccaggagaggtattgctggatcctccggtagtactatgtccaattttctgaggaaccgccagactgatttccagagtggttgtacaagcctgcaatcccaccaacaatggaggagtgttcctctttctccacatcctnnnnnnnnnnnnnnnnnnnnnnnnnnnnnnnnnnnnnnnnnnnnnnnnnnnnnnnnnnnnnnnnnnnnnnnnnnnnnnnnnnnnnnnnnnnnnnnnnnnnnnnnnnnnnnnnnnnnnnnnnnnnnnnnnnnnnnnnnnnnnnnnnnnnnnnnnnnnnnnnnnnnnnnnnnnnnnnnnnnnnnnnnnnnnnnnnnnnnnnnnnnnnnnnnnnnnnnnnnnnnnnnnnnnnnnnnnnnnnnnnnnnnnnnnnnnnnnnnnnnnnnnnnnnnnnnnnnnnnnnnnnnnnnnnnnnnnnnnnnnnnnnnnnnnnnnnnnnnnnnnnnnnnnnnnnnnnnnnnnnnnnnnnnnnnnnnnnnnnnnnnnnnnnnnnnnnnnnnnnnnnnnnnnnnnnnnnnnnnnnnnnnnnnnnnnnnnnnnnnnnnnnnnnnnnnnnnnnnnnnnnnnnnnnnnnnnnnnnnnnnnnnnnnnnnnnnnnnnnnnnnnnnnnnnnnnnnnnnnnnnnnnnnnnnnnnnnnnnnnnnnnnnnnnnnnnnnnnnnnnnnnnnnnnnnnnnnnnnnnnnnnnnnnnnnnnnnnnnnnnnnnnnnnnnnnnnnnnnnnnnnnnnnnnnnnnnnnnnnnnnnnnnnnnnnnnnnnnnnnnnnnnnnnnnnnnnnnnnnnnnnnnnnnnnnnnnnnnnnnnnnnnnnnnnnnnnnnnnnnnnnnnnnnnnnnnnnnnnnnnnnnnnnnnnnnnnnnnnnnnnnnnnnnnnnnnnnnnnnnnnnnnnnnnnnnnnnnnnnnnnnnnnnnnnnnnnnnnnnnnnnnnnnnnnnnnnnnnnnnnnnnnnnnnnnnnnnnnnnnnnnnnnnnnnnnnnnnnnnnnnnnnnnnnnnnnnnnnnnnnnnnnnnnnnnnnnnnnnnnnnnnnnnnnnnnnnnnnnnnnnnnnnnnnnnnnnnnnnnnnnnnnnnnnnnnnnnnnnnnnnnnnnnnnnnnnnnnnnnnnnnnnnnnnnnnnnnnnnnnnnnnnnnnnnnnnnnnnnnnnnnnnnnnnnnnnnnnnnnnnnnnnnnnnnnnnnnnnnnnnnnnnnnnnnnnnnnnnnnnnnnnnnnnnnnnnnnnnnnnnnnnnnnnnnnnnnnnnnnnnnnnnnnnnnnnnnnnnnnnnnnnnnnnnnnnnnnnnnnnnnnnnnnnnnnnnnnnnnnnnnnnnnnnnnnnnnnnnnnnnnnnnnnnnnnnnnnnnnnnnnnnnnnnnnnnnnnnnnnnnnnnnnnnnnnnnnnnnnnnnnnnnnnnnnnnnnnnnnnnnnnnnnnnnnnnnnnnnnnnnnnnnnnnnnnnnnnnnnnnnnnnnnnnnnnnnnnnnnnnnnnnnnnnnnnnnnnnnnnnnnnnnnnnnnnnnnnnnnnnnnnnnnnnnnnnnnnnnnnnnnnnnnnnnnnnnnnnnnnnnnnnnnnnnnnnnnnnnnnnnnnnnnnnnnnnnnnnnnnnnnnnnnnnnnnnnnnnnnnnnnnnnnnnnnnnnnnnnnnnnnnnnnnnnnnnnnnnnnnnnnnnnnnnnnnnnnnnnnnnnnnnnnnnnnnnnnnnnnnnnnnnnnnnnnnnnnnnnnnnnnnnnnnnnnnnnnnnnnnnnnnnnnnnnnnnnnnnnnnnnnnnnnnnnnnnnnnnnnnnnnnnnnnnnnnnnnnnnnnnnnnnnnnnnnnnnnnnnnnnnnnnnnnnnnnnnnnnnnnnnnnnnnnnnnnnnnnnnnnnnnnnnnnnnnnnnnnnnnnnnnnnnnnnnnnnnnnnnnnnnnnnnnnnnnnnnnnnnnnnnnnnnnnnnnnnnnnnnnnnnnnnnnnnnnnnnnnnnnnnnnnnnnnnnnnnnnnnnnnnnnnnnnnnnnnnnnnnnnnnnnnnnnnnnnnnnnnnnnnnnnnnnnnnnnnnnnnnnnnnnnnnnnnnnnnnnnnnnnnnnnnnnnnnnnnnnnnnnnnnnnnnnnnnnnnnnnnnnnnnnnnnnnnnnnnnnnnnnnnnnnnnnnnnnnnnnnnnnnnnnnnnnnnnnnnnnnnnnnnnnnnnnnnnnnnnnnnnnnnnnnnnnnnnnnnnnnnnnnnnnnnnnnnnnnnnnnnnnnnnnnnnnnnnnnnnnnnnnnnnnnnnnnnnnnnnnnnnnnnnnnnnnnnnnnnnnnnnnnnnnnnnnnnnnnnnnnnnnnnnnnnnnnnnnnnnnnnnnnnnnnnnnnnnnnnnnnnnnnnnnnnnnnnnnnnnnnnnnnnnnnnnnnnnnnnnnnnnnnnnnnnnnnnnnnnnnnnnnnnnnnnnnnnnnnnnnnnnnnnnnnnnnnnnnnnnnnnnnnnnnnnnnnnnnnnnnnnnnnnnnnnnnnnnnnnnnnnnnnnnnnnnnnnnnnnnnnnnnnnnnnnnnnnnnnnnnnnnnnnnnnnnnnnnnnnnnnnnnnnnnnnnnnnnnnnnnnnnnnnnnnnnnnnnnnnnnnnnnnnnnnnnnnnnnnnnnnnnnnnnnnnnnnnnnnnnnnnnnnnnnnnnnnnnnnnnnnnnnnnnnnnnnnnnnnnnnnnnnnnnnnnnnnnnnnnnnnnnnnnnnnnnnnnnnnnnnnnnnnnnnnnnnnnnnnnnnnnnnnnnnnnnnnnnnnnnnnnnnnnnnnnnnnnnnnnnnnnnnnnnnnnnnnnnnnnnnnnnnnnnnnnnnnnnnnnnnnnnnnnnnnnnnnnnnnnnnnnnnnnnnnnnnnnnnnnnnnnnnnnnnnnnnnnnnnnnnnnnnnnnnnnnnnnnnnnnnnnnnnnnnnnnnnnnnnnnnnnnnnnnnnnnnnnnnnnnnnnnnnnnnnnnnnnnnnnnnnnnnnnnnnnnnnnnnnnnnnnnnnnnnnnnnnnnnnnnnnnnnnnnnnnnnnnnnnnnnnnnnnnnnnnnnnnnnnnnnnnnnnnnnnnnnnnnnnnnnnnnnnnnnnnnnnnnnnnnnnnnnnnnnnnnnnnnnnnnnnnnnnnnnnnnnnnnnnnnnnnnnnnnnnnnnnnnnnnnnnnnnnnnnnnnnnnnnnnnnnnnnnnnnnnnnnnnnnnnnnnnnnnnnnnnnnnnnnnnnnnnnnnnnnnnnnnnnnnnnnnnnnnnnnnnnnnnnnnnnnnnnnnnnnnnnnnnnnnnnnnnnnnnnnnnnnnnnnnnnnnnnnnnnnnnnnnnnnnnnnnnnnnnnnnnnnnnnnnnnnnnnnnnnnnnnnnnnnnnnnnnnnnnnnnnnnnnnnnnnnnnnnnnnnnnnnnnnnnnnnnnnnnnnnnnnnnnnnnnnnnnnnccgcctccccagccgggtgggcacctgtcctccggtccggaaagtggccggctgtccccggcccacacagggtgctgcctcagcgcctctgtgcttctgcctgttccagaagctgtcaggttctctggcgcaccctctcacctgttcagactaatttcctaagttcggcgggtcccggaccaagatggcgaccgctgctgctgtggcttaggtcgcctccccagccgggcgggcacctgtcctccggtccggaaggtggccggctgtccccggcccacacagggtgctgcctcagcgcctctgtgcttccgcctgttccagaagctgtcaggttctctggcgcaccctctctcctgttcagactaatttcctaagttcggcgggtcccggaccaagatggcgaccgctgctgctgtggcttaggtcgcctccccagccgggcgggcacctgtcctccggtccggaaggtggcccggctgtccccggcccacacagggtgctgcctcagcgcctctgtgcttctgcctgttccagaagctgtcaggttctctggcgcaccctctcacctcatcttttgtcaatttgtaaactgagctgtttggtgatttattatcacattacaaaagatttttaactcttctagatagaaacctcctggctgatattatattttgaatgaatgtgttttcctacccccaaggtaatatttcaagacaagagactagaaagccccagtgtctccattccacacagaaacattaaacaacaataatgagattgggggaggcaaatgcttaaaattaaaataacccttgagaaagtatggacagtgaaatcagtcagtgattgaaggtgataaacaaagcagggaagcaaggtgattcaccgcgtttttagtcttgtgtgctgcgtagtgtggtatggctgctgcatggttgggaccttccttcctggttagtgctgtgggcttctcagactccatactttctaatagttagtattcaggcatgcagannnnnnnnnnnnnnnnnnnnattgtgttgaaaggaccctgctatagctgtctcttatgaggctattcttgggcctagcaaacacagaagtggatgctcacagtcagctattggatggatcacagggcccccaatggaggagctagagaaagtacccaaggagctaaagggatctgcaaccctataggtggaacaacaatatgaactagccagtaccccccagagctcgtatctctagctgcacatgtatcagaagatgacctagtcggccatcagtggaaagagtggcccattggtcttgcaaactttatatgcctaagtacaggggaacaccaaggccaagaagtaggagtgggtgccggaggagagtgtggggggggggggaggacttttgggatagcattggaaatgtaaatgaagaaaatacctaataaaaaaggaaaataaataaaaataaataaaaatcacatctcatgattataatcgaggactttaagaaggacataaataactcccttaaagaaacacaggatgcataccacacttcattgaaccacctatccattggtgaaccttgggtgatatccttccatgattagtgtggatgctgctgtgggttatgtaagtgtacaaatagatgctccagtgtgggagaatcgagggtggggaggtgggtttgggtggnnnnnnnnnnnnnnnnnnnnnnnnnnnnnnnnnnnnnnnnnnnnnnnnnnnnnnnnnnnnnnnnnnnnnnnnnnnnnnnnnnnnnnnnnnnnnnnnnnnnnnnnnnnnnnnnnnnnnnnnnnnnnnnnnnnnnnnnnnnnnnnnnnnnnnnnnnnnnnnnnnnnnnnnnnnnnnnnnnnnnnnnnnnnnnnnnnnnnnnnnnnnnnnnnnnnnnnnnnnnnnnnnnnnnnnnnnnnnnnnnnnnnnnnnnnnnnnnnnnnnnnnnnnnnnnnnnnnnnnnnnnnnnnnnnnnnnnnnnnnnnnnnnnnnnnnnnnnnnnnnnnnnnnnnnnnnnnnnnnnnnnnnnnnnnnnnnnnnnnnnnnnnnnnnnnnnnnnnnnnnnnnnnnnnnnnnnnnnnnnnnnnnnnnnnnnnnnnnnnnnnnnnnnnnnnnnnnnnnnnnnnnntggccggctgtccccggcccacacagggtgctgcctcagcgcctctgtgcttctgcctgttccagaagctgtcaggttctctggcgcaccctctcacctcatcttttgtcaatttgtaaactgagctgtttggtgatttattatcacattacaaaagatttttaactcttctagatagaaacctcctggctgatattatattttgaatgaatgtgttttcctacccccaaggtaatatttcaagacaagagactagaaagccccagtgtctccattccacacagaaacattaaacaacaataatgagattgggggaggcaaatgcttaaaattaaaataacccttgagaaagtatggacagtgaaatcagtcagtgattgaaggtgataaacaaagcagggaagcaaggtgattcaccgcgtttttagtcttgtgtgctgcgtagtgtggtatggctgctgcatggttgggaccttccttcctggttagtgctgtgggcttctcagactccatactttctaatagttagtattcaggcatgcagatctttactctgcctgcccatggctgcaggcaagctgctctactggagtttctagttcagtcactgtgtttttcagcgttgaggcttctgttgctccttttcagacatcctttggtgatctcagcatattcagacagttgtttagaaacatctaataaatgtaatgcatacatctctccatggcaatttgttattttaataaaccacgtttttctgtttctctgtgagtcttacaattagtcaaaaactggacacttggaaacacacaaccattctagggtttgtagatggacatggaagattttagtgtactaggacatatcccaacctttggtgacaatgggagattaaatatcggggtcttctccatcttattttggcctccctgctagctggatttaagtttgtaagttttctgttttccccatatatcccactggggcaattgatgtcctgttgccttctttcttctacccgttatccgtttccccagtgatctaggctcttactgcccttgaagctttcgtgtgttcaaatcacatcagcctctttcagctctaccagactgggtacacacttcgctgttctctctggataagctctggatcatagcagatatagtcagctcccgtacaacctacagacaaattctaagagagttctcctctgctctgctggcgcacaagaaggaatcaggacagaccatcctgacagtgccacccctagccacagcaccaatgcagcaaaggagaacaaaagcactgtgaaccatctcgcttaccacacttttataagccgctggggatctttgattttggtgactagcttttcctgggggttactttaatttggcacatttactttttgctgtcatggtggtcgtggtggtggtggtttctttccattgtttggcttttgtgtgtggaaataggtacttggactttctactctgatattttgataatttcacttcgattcaagttgtttttaataaagctccatattttttttccatttccttcttgcctagcctatagcaggtgactttgggagaagagaaataaatagcagctttattcatgacaatgtatgagacatttccagactttcttcaaatggcacaagtattccttattggagcttgcaggctatagtctgaacagtgcccatggctttgggttgcctaggatgtatgtttccattagaattttgtactagagtcagaacttttctatcgatacaaagaaaaagggtaagggctattagcaaactgggacgagaactccttttgttaacatattatatacttttctcccaaagatgttcatcagagtaccaggattctctggagttctgagctgctcaggttatctcacaggtagaacttggttcagaattttgtgaattacaatcattggattcttttatattttgatattatctggggtgggatatcttttcatttgtccctagtttaaagtatcatttttatccataatcaaaggcagacataacctacacaactgcctgttgacaggagaaccacgccactcttttactgtgaccaaacaaccaaaacactaaaacacagggaaagattgcagaccaatacaaccctttacctatacaaaaggcctgctcccagaaccattgatttccctgtggagtgatttcaggcccaaagtgtcccaattaaaagaccaggccctcttatcaccatttatctacagatagtccccactattctacttagtaagcctttaatttttctttaatataaatatttaaaaatacttagaagcacctgacctattgatgactttcctaagacacaaagccttgcttctagtttctatattttcactcttggtgcacgctcaccctttttaatttcccacaggtgagattctttgcacaatattgttttagaaatcacctccttctccacccctgcagaataacgggatgcatgagatgtccttagtagagataactcaaaactgtagtaagagggaagttgtagatagaccttgtaattgaaaggcaaacttgtacatttggtctcttacatcaatctctacagcattgttatgagatggaagttgtcagagtagaatcattggttacagaatggctgctggagtctatgtccttagtactcaaacttgagatggaagtgtttcttaaagcaaagaaacaaatctaaaaggcacactcaatttgtctgaaacatcagccttcctctctggctacctttgtcccctggctcccagcactttgtatttagatgaagctcttggcttcttcctgaggctagcacgtggaaatgcatgtgtatgtaccttgcaatttatgtctgtgagatacatattttttattaggaaagctgtttccaaaacagtgtagggagatagtcctttcccttctgataagtatataatgctctctggttgcacagctcaaactggctccaaaagacaggggcctccgtccttcacctcccccactctgtccccaacactgtcattctaacaataatccaacattgcctggggtcactagtcttattaaatactcagagacccatgttcagtctccgagtactccttgctgacattctcctccttccagtgtttctcctccattctcatgccttcattatagcccaatcctatgccttcagatgcctgaattgttaaaagagccccaatccctaatcaacataggaccactgagttccattcatcatgacccacccattttaaacatcattgttcccaagtactgctcacaccatggaaatccccatcttaaaagtattggtgaccaatagtgacttccagcaaaatctaatccacatgctttcttcagccctctctaaatctgttacaatggaccttaaaatggaattcgtatggatattctagtgtcctcatagcacagatccataaaaaaggtgacaagatgctggagtaaacccaactctaggaccagacatgcatgtgttcaatcccatttctcaagcagtgaaataaatgacctaagtttttttcatatgaccataacaatattttgaaggcttgctatgaataataataatgcttattttatgaacatatctatggcatgtagcatttagccttcagcaaatgcactgaccccccccacacacacacctctcctgctttcatgcctgtcagtgtcctcagtcaaaatgaatttccatgtcccacagtagctcctgtccatcagttgtgacctttatagaaaatgccccttattagctttcttctcaaaaaatatttatttgtattatttttaaattatgtatatatgggcacctatctaagtgtgggtatatacatgtgagtgcagatggccacggaggatagaagaaggtgctgacatcccagagctggagttacaggaggttttgtgctgccctgtgtgggtactttgactgaagttgggtccttcagaagagcaatatgctctctcaaccaccaagccatctctccatctcccgtacaccttttttttaaggcttacacctttttttagtaaactattttataaactttggctgacatttatcttccctttccttggctgtaggtgttacatttaactccatacttagttatagaacacgttttccaatgtggtgtcattttatgttttatactttatgggacacaagctattaggaaccacatcttacactcgaatgtacacccccccataattagcatcgttttaggtacacataaatgataaattccactgatttgcttattgatcttgaagcgcagtgaagcctgtctagtgggcaccagtctaagtagcagacagagggatatagagcagacaaccgatggtgttctgtagagcaagagtgaccagggaagtagcaggcatgtgagggaccattctctagaatgttcagttcatggttgctccttatgacacctctgtggaggcatgatattcttctcttattaaaggcaggaatacagctgcaagtccaaagccccctagagctacataaagagaactaaaccagccaggctacacagcaaaagcctgtcttgggaaggatatgtaatttagtcaggggagggcttgtcccacaagcatgagaacctaagatcagatttccaacacccacctaaaaacctgggcgtaatggctcaagtccgtaatctcagtgctggagaagtagagacaggcagattcctggaacttgctggccatcagcctaggcaaatcagtgaactccaggttcagtgtgagaccttttctgaaagaataaagtaaaaagtggctgaggaaaacagccagtgttgtcttctgacctacatatgtacacacatacataccaacgtgcacacatatacacatataagtgtatacaaacacatatacagtacaacacacagtgtatgcgtgcacacacacacacatagatcctgtctcaaaagaagacacatgcaatgcagcaagcccactggactgtgttactattcccaaaagaatgtctcaactctccattccactctgcagagacacttcgcctgccagccaggaggcatgctgggaaagttctccagaacatttagttcacagcctgtccttattacacctcagtggagaaataatatttttctcttattaaatgtagcccagtgacaatagctgagttgtgaacatttgggaaatagtaaaaaaaaaaaaaaaaaaaaaaaaagaaaaaaaaaaagaaagaaaaaagaaaatgctccaggagtcttgaacaaagcccgtggttcttgtaaaagtttggaaagtcgcattgagctgaagataggtgctgctgaaatattaatgtcccacatctcttaagtaaacctcatcgtagaatatgtaaaaccaggatgataataaaaacagtctaagtaaattttgaggggtaactgcgcaattgaattgaagtgcttgaagccattgtaagtgtagtctatcaaagaggaaagtgtgttttattggttagaacccttaagcaatttctgagaggtagtgaaggttttttcttttttttctccttttttgatcctaaacagtaagctatttctcatgttaatgtgtacttaagacttactggaaatactcataatatgagctgaagactgatgtctggcagcaggcgtatttctgaaattgggttggttttttactactatattttctgaaatatgccttcactggtatttacaaaacaaattgccagttcacacaaaggttgttttttaataaaagccaatgaaaacaagcgagttgctaggaagaacgttaaaagggaaatggacttttcataacctcacattataattcctccttctggacaaaagtgtattatttgaatgagtttggagctaaagggaattagtatgtcaaattatcccaccgagctgttatgtgtgatcatttttattgcaactgaaaaagagcagtaaatgcaagcaagaagtgagcgctgccagggagcttggcagcagcttaggaaaatgccagtggaagccatggtggctgttgatcagggttctctctggccatggaaactgtcactggctcccaattcccaaagtgtcctgcctatcccagtgacactagtcctgcttcttgtggcttttctctggccatctatctcctcttcctccactgaaagagaatggcctccacaagagctccaggcaattacctcccctcctgccaacttctttccattcacatcctctccagcaggatgcagaaagcaactcctgccatacccgctggcactcgctgactcgcctcttttcgataaacttcagtggttggcacttttaagaattacctcttttgaattgttgcactatgatttcaggggcaccccctggatggctgccctctgacgctacgaattcccagacatcccagactcctaatgcttcagatttgatctccccagctacatcatctagtagtgatggccacagcatgcttcctcccagatgaccaactggactaaatataccgatgtagatcgctgtctcctgagtaaggatcacacctcccccactgacaatgagaccattgctgaggtgactcgggccgttcaatacatgagaaatgctatcttgcttgtgattgaaggctttacatacccaaattccaactctgtgttgtccccagcaatcctgaccttgtctgaggctgttattcaccaagactgtaacaagaggaaaaccctaactgccttcccaagtcctcttctctagtctatgatcaactcttcctctcttactggctccacctttgaaatcatctaagctcccagccctgactccctgctgtgcctaacctgagtggcagccattttttgcccatgccacaaaacagccaagactattgtagctttgtctgtacctcctgtgctccctgcctcgacctccactctccagaaagcagccacatgatcctaacaaacgccttttaggtgtttctggcctctcctgactttgtttcaccctgtcgccaggcccactgtaaccacactggccttttgggtgatcctaaagccatcagacaacacagggctgccttggactttgttttgctgtgcctggaagttatgtgagccaagcttgtccatgcatgcctccttcaggttctgctccccagatgcccccttagaaggacaggacagaaactgtgaattaggtcatcatctctcatacagttttcctgccacacgagaccaggctatgagtggccagccactggctctttctctaggggctgccagatccctgtctggctcatggaggagctcagatgtgtttgctgaagtgctggaaatgagaaggagcacttgaggacagtatcgtcgctgtttgcaatagcaactcaggaaaatgcgtggcagtggaaggcacagaaaaccttccatatttatgcatagtcactatttctaatgtcactttatacatagactaaaagctcaacatactcatgactgaacaagcctttgctatggctgtcctatgcagtatcattaaaaatcaccccagtggccccatcatgaaaatggacagcaactcttgcctgttctttgcttctaaaccccttcagtctgacttcataatttctaattagcactattctagaatccttacctttcaccaacctgtcttcatccagaagtgaacatgcaaaatatttgaagagtcatcctatttcagttaagacacgtgtgaaaccataaatcagttttatctgctaagctatatcttggtaaatagcttgtcagatgataggatttttagtttattattcatcaagttgttctggtaatttcagaattgtgtgttgattttttgaatgtggtgtagtcttttggctagcttgactcactccttcaatgatgctttggctaagtacaatgagcccaagagcgctgggctcaaccacagctttcccatcgaacttataaccaataaatcagtgtgtgtgtgtgtgtgtgtgtgtgtgtgtgtgtgtgtgtgtgtggtgcttgctgtgtacacagagcccttattggtgttctcagcatactcaagaatctttcagtttttgctaagcttttagtattacaggtaaagcttttcttagccctcataccctcagagatttggcatatgtaattactttactatctttattattaaataaatgataaaattattgtaatgttatatttaactgacttaatttttctaaattaatgtcataatgtttatattaaaatagaaatgttagatttatatatacatatatttatatttactgtatatactatttatacagtaaaatattatgaagtaaatttataatacatataaataaatacatttatatacatgatacaacataccatatatacatgtatatcatatataatatatcttatatatcatgtatcatggtacatggtatcatagatcatgtacatgtatatcacatattatatattatgtatcatatatctcatatcatgtatcatataccatgtttcacataccatgtatcatagcatgtatcatatttcatatatcatatatcatgtatcattcatcatacatcatttaatcttatgtcatatatcatgtcaaatatcatataccaataaatcataatatatgcttatatgtttacatatgatgtggtataaaatttataatgcataaactataactaattgttttctttttagtcactttgcattccttgtgttatgaaccacagtgagaatagcatttgggactgaacacattgagtcagattagtccactgtagtggactaacagtaaacccatttccatacaattattgcatagccagatagcatttcttttgtaattgatatcttatcttgtttcaaaatacactttttacttcttagtttttatgtattttctcatattgctttattttttgaggtggcctaatgggcccattgctacctggtcatgcatctgcatcactggtcttcggtctcactcacgccccttcccagctgtttccctcccttccttcccccacttagcccaacttctagtttctatcacatgtttcccatcacttactattcttctcacctctctaaaactctcttcctcccttctcatcatcccgtttctagtctcatcacccatcataaataaacaaacacatacatatgactacatacatgcaaacacacacattttacgtctaggttccttgcacaagcaaaaccatgcaatgtttatttttctgagtctggcttattttcacttaacaaagtggtttctagttgcatccttcttcctgcaaatgtcatgatgtcatttttctttaggactgtataaaatttcagtgcctagatgtaccacatgggttttattcattcacctgttaatggatatctaggctggtccttcctgtcaccattgtgaatagtgcagcaatgaacatggacatgcagatgccattgcagtaccacttgtctcagcacaatttgttaaagaagctctcttgcaacatatgcttttgacagctttattgaaaaagtgcatggctatagctgtgtgggttttttttttctgggtcctctctcctaacccattggtcttcctgtctgatttgtgctgctacaatgatgtgtttggcttgggaatataatttgagatcaaaccttgatgccaacagcattgttctctctgccaaaatttgcttttgctaattgagatcttttatgctttcagatgaatttggggatttttttcttgttcaatgagccatgtcattgtgactatgaaggagatggcactggatgtgcacattgcttttggcaatacagacattcacactagcttcttctgtctatccaggagcagggaggtctttccacctgccagtttcttcttcagttattaagtatcataaatttctcactgtagaggcctcttactggcttgattggaattattgctaagtattttatgtttctgaagctatcagcaaagctttccagtgagggttttgtttttgttttgttttgtttgtttcttttttcatttaattcattgacttctacatttccaatgtttctgctttttaaatctttaatttccttgctgaatttttcctctatgttgcttgtttttgtttttgttttttgacttttcttctatgttgacttttccctctgggccctgtattgagttcatccacctattaattgattcctttttcacgtcattgatcacttttaccagcaaacttttgacatattcacctatccttagacttagttcagcatctgtgagttcagtagctgaggagttgtgatcttttagctgtgttgtaattagcacagctactggtttggatatctcttctggatttgagtgaagattttattaatgaatagcttactcatgacggttctattaccagtaccattctgtgagaaggaaatgaactgtagcaacagcaacactaagccctgcgaaatatagaagcaaacttaaaatcagttgcagcttacagtcacgccatcagtggtcccaaagcttcaagagaaaactactggggccatgttttgaccatggaaatttatgtagggtgactgtagaaataataaataaatgagaaaaagaaaagagatatttgtcttagtcagagttattattgctgtgatgaaataccatgaccaaaaagaacttgtggaaaaaagggtttattttgctcacagttccataaatgcggagaggggaggagctcacacaggacaggaacttggaggcaggagctgatgcagaggccttggacagtgctgcttacaggcttgctcttccgtggcttgttccggctgctctcttctagaacactgaaccaccagcccaagaatgtccccacccacaatggtcggggcctcctcccaccaatccctaattaagaaaatacactacaggcttgtctaaagcctggtcttatttatggagccattttcttccttccttccttccttccttccttcctttctttctttctttctttctttctttctttctttctttctttctttctttttcaattagatattttctttctttacatttcaaatgttatctcctttcctggtttcccctccgaaaaccccttatcctctaccctccccatgctcaccaacccacccactcccgcttcctggccctggcattcccctatactgaggcatagaaccttcacaggaccaagggcttctccttccactgatgactgaataggccatcctctgctacatatgcagctagagccatgaatcccaccatgtgttttcttcagttggtggtttagtcccagggagctctgagggtactggttagttcatattgttgctcctcctatgggactgcaaacccctccaactccttgggtactttctctagctccttcattgaggaccctctgctccatccaaccgatggctgtgaacatccacttctgtatttgtcaggcactggcagagtctctcaggagacagctatatcaggctcctggcagcaagctcttgttggcatccacaatagtgtctgggtttggtggttattctcaactgaggaatactgaatggctgagaagcacctaaaaaaatcttcaacatccttagtcatcagggaaatgcaaatcaaaacaagcccgagtattctacttcacactagtcagaatggctaaaattaaaaactcaggtgacagcagatgctggcaaggatgtggagaaagagaaacatttttccattgctggtgagattgcaagcttgtacaaccactctggaaatcagtttggcagttccttagaaaattggacataatactaccggaggatccaacaataccactcctggacatataccgagaatatgctccaacatgtaataaggacacatgctccactatgttcatagcacccttatttataatagccaaagccggaaagaacccatatgtccctcaacagagggatggatacagaaaatgtggtacatttatataatggaatactactcagctattaaaaacaatgaatttataaaattcttaggcaaatggatggatctggaggatatcatcctgagtaaggtaacccaatcacaaaagaactcagatgatatacactcaatgataagtggatattagcccagaagctcagaatacccaagatataatcgcaaaacacatgaagctcaagaagaaggaagaccaaagtatggatacttcaatccttcttagaagggggaacaaaatactcatggaaggagttacagagacaaagtgtggagcagagactgaaggaatggagccattttctagattgatgttccttctctctgatgactctggtttgtatcatggtcacctaaaactagccagtataatgtagagggggtcaagaggagaaataggttaaacaaaggaaaacaaagaataaagaagaatttgatagtgaggaaggaaaaagaacaagaagttacccaaattaagaaaaaacaaacaaacaaacaaaaaaaaaaacagggcttcccaaaactgaaaaagttcaaaaacaaaattagatgaatataagaataaaattaaaaacattaaaattttaaaaattaaaaacatggggcaaagcacaggatatctgaagcaataatagaacaatgaagaacttctagaggtatcattatcctgatcttaagctgtgttacagagcaatagtgacacacaacatgatactgatataaaaacaggcaggttgatcaatggaatcccatcaaagacccagaagtaaatccacacatttatgaatatttgatgtttgacaaagaagccaaaacaatacaatggataaaagaaaacatcttcaacaaatgttgctggtctaactggatgcatgtagaagaatgcaaatagatctatatctatctccctgcacaaaagtcaagtccacgtgaagcaaagacctcaacataaagcataaaactggatacgctaaatctaatagaaagtatggaatagctttgaatgcattgacaccacatctgacagagcactaatatcccaaatgtaaacaattccagaaactaaacatcaacaaaccaaatacctaattaaaaaaaaaaaacggtgtatagatctaaatacagacttctcaacaaagtaatctctaatagccaagagtacttgaagaaatgttcaacatccttagtcatcagggaaatgcaaatgaaaaggactctgagattccatcttcaattgaattttatggaaaaggtgaaatagattagacattgcacatgtatggcccagtcacgagtcccagcttgagacccatgccaggaaagggagcccacccctgactatgatgattgcagacagagcctagcataactgtcagagaagcttcacccagcagctgatggaaacaaatgcagagacccacagccaagccaagggagcttgagacgtcctgtggaagaggggaggaaggattgaaggagtcaatgacatcacaagaagactccaaccttggcccataggggttcatagagacagaactgccaaccatagaatatgcgtgggacagacacgggccccctgcacatatgcaccagttgtgcagctgggtcttcatgtgggacttctaaagcaggagcagtggctgtctgacaacatttcctccctttgcatccctttctcctaaccgggctgccttgtccatcctcagatgcacctaatgttagtgtaacttgatatgccaaggctggttggtatccacaggaagtatcttagttggggttttgttgctgtgaacagacaccatgatcaaagcaactcgtataaggacaacatctagttgtggcgggcttacaggttcagaggttcatcccattatcaaggcaggagaatggaagcatccaggcaggcatggtgtaggagaagctgagagttcttcatcttgttcttaagggaaacaggagaagactgacttccaggcagccaggacaagagtattaaagcccatacccacagtgacacacctactcaagcaaggctacacttcctagaagtactatgccctgggccaaacatatacaaaccatcacgggaggcctcctcttttctgaggagaagtggaagagggatggatggggagggaaaataataaggaggattttaagggagaggaaggagaagaggctgagatcagatgtgaagaaaataatttaataaacaaattaaaaacaacaaaatattttaaagccaataggtttcatcaaaatattacaatttgtaggaagaaagaaacaaagtaaaacagataaaaaaataaagtaaggttaaaatattgctcaaaaatagaaaaattataagtaaagctaggtaaatgtgtaaagaagtatagcattacatttagaattatttttacatacaataaagtaaaaagtctggtaaatacctgcaataattactttttgttttcaactcaactcaacctaaaatctctcagtgaggttgttaatgttgagttggcctgaggacaatcctgttgggattgtcgtaaataagttattgatgtaggaacaaccatcccactatgagtggcaccatccctaggcaaaggatcctgaaccctatgagtggagaaatataactaactacaagcaaccaagcaagcaaatacatatatgctggttactctctgctccgactacagatgtgatggctagttatttgaagctcctgccttgactcctccacagtgatggacgggaacctggaattagatgaaataaactctttcccctattctgccttttgatggggtattttatgacagcaatcaaaaagaagctaaaagaatatatgttttaaaataaaaaggtatataaacatcgttctgtgtccttgaaaactagcattgccaggtatgcggatgggggcaggcagggtcagttatactgtgtcctcctctttcctacggtttctgctgttgctgcttctgtatgagacaagcacctgcatgctatcttcaccataacttttcctttgtgttcctggagcctctgctggccacacttagctttgcagtctggggctgagcagattctctcaattgttgagaccccccagatcataccctctgaggtggctgtcttagctagaggtgtcccccaactactatggctgagtgtagaagcagccatagccctgagatgtgtgccagtggaagacctgacttcatgctaaagggattcaactatagatatcatgtacacctctagtaattcaggattgctagatttatagtagtgaatgacactaggtggctccagaattcagtctgcctaccagtctatcaactagagggcaggcactggtgaaaaagctcagcccatcaaatgctttcacagaagcagaaagacctgaattcagtgctgatcacctgcataacgagccagaagaatcccccaagatccttgatgagatggttagccaatgaagttggcatttccaggacccaatgaaagaccctctctttaaaaagcaaggctaataactcctgagaactgtacccgaggtttatctctggccttcacatatgcatgcatgcacacacatatatacacacagacacacacatgcatactctaaacacacacatgcacaccacatacacacatgcacacacatgcacacacacatacacacacacacatgtttgtgcacacacactcacatatattctctctctgtctctatctgtctctgtgactcgtctttctctgcctctctgtgtctttttttctgtctctctttgtctctgtctctctctgtctctgtctctttctgtctctctgtctctgtctctctgtctctgtctgtctctgtctgtctctctctctgtctctctctgtctcttcctctcctgggctctctctctctctctctctctctcacacacacacacacacacacacacacgcactccttagagggtaactacaagttgatatagtctgttcccagccatgaccccagcctaagtcagccttctgccacctgctcccttcagcttgtccatgctcatcctttcctcccattcagaatctgaggcaagccaaacagtctcattgacctatggattttccctgatctcgggcccccaaggtagctcagttttagcaatacatcctctcacgcgcctggccaccaccctccaggtcacacagtttaagaaaaagagactcgtttttcagtgagacaatttccccagtcaagccacctcctaagtctaaaatggagatttcttcccactaccctcccaactgctagaggactcattgtctcaccaaaacctgcggcaggatttgaggctcacagaggctatggggctgttctgggggcagagctagcaccttctgtcttgtaaatacaagtcattcagctttacctctcggtcaggaagcttcaaagctgaaaccacgttgggctcactgtttttcctcctgtgtcctttctccctgtacatcacagcaccctttcacttcttagtagatctttgaaactcttcttcagtttctctccttgggtaaagtctatttattcttactcagatgttttctgtctcgagatcactcagaggcatccccagcattcctctaggtatgtgatttgttcatgcatgtttctgtatcagtgactagtgtgttctttttcattcattgtataaatgccctctagctatttccatacattatctccatatggtccttggcttatctttgaagggagggtattgcatatatacatatacaaacttctctttgaccatatgcactagctcccctgggaaaagatgttcaggtctagaaatactatgttgtaggaagagcctatgtttaattttagtaactactaccttacaaatgcctgaaggaattgcaccaatcttttcttattagcaatttatgaggttgtgagtcatctggtaagttctaccattattgatttacttactatatgggttttggggcatgcacagaggtcagaggacaacacaggcctttcccttgtaccatgtaggcccttaggactgaactcgggtcatcaggcatggcagtaaatacccttaactgctgagccatcttcccaaccccactccccatcattcttataaaaatattttcccatctctatcctaatattgttttagtagctccccgcctctgcccctttcttcactctatggcttttgccaaatgttctacctctttgcttatgtctaaaactgaacccaccgttccaagtgtagactctctgacttcatagaacgtttgtattctacttcccaacaacctctctctgcacatggtaaacacatattttgcccagggctgaagtacaggcctcttatagcagcagaaagtcatcacatataaatgtatttgctgagattgatagtagaacctctacactggaagctacgatttgggatgtattttctttggtgaactcacttaccagtctcatgaatctcatgagcatatctgatttctcaaagatttaggatacctccttggcttactcacctattcccttagcaccatctcctcatcgcagctgatagcaaaaacaaggcagaggaggaggagccttcatctgtcagttggatcatgtctgctgtgtgtctccttgataagtctccacatcggactttccttctttaaaatgaaatcagtgagacacaatggcaaagaaaataatctcacatcactttcaacctcactatgggagtccattttcatatcctttgtggcagttaataagttccatcatccaaggccacttcccagaattccctactgttaacatgcctccacgcagagaatgccccatttaacctcacctttgtctccaagccagatattcaccatgacaaatctttcttctacttctatggtaactcaatattttggtagggaaacttataaaatgctttctaaatgtctagataaattttgtttcctggttttcctcgtcttcaacactcaccatcccctttgagtgttttccttattcattttctgttaaatataattataacatatggcctggggtggcccaggcgatatagatatttctcactcagtgtatattgaactgaaaagttcttcccaaactcatgactgcactcgttcagtgtagtaacattgaattgacctattcctttgtgcctgtcacctatttcagatgctggtccatctgtcacatttctcgtggctgtgacatattacccagtgaaggtggtttaatgatggagagtttattttgcctcaagcatttgagggtttgatgcagtgaggtgggggcacctctgactgtgctgtctgacagaaacatgaggccactagtctcatcacatgaaagtcaggaagcagagaagaaggctggtgtccagtgggaggtccccttttcattcggtctggaacccccgcccatgagggtgctaccgacattcagagggagtcttctacttcagttacacctctctggaaacagtctcacaggcatggtcagagtttgtcttctaggtgattctaatcctgtcaggtagatgatcatgctgaacaagaacacatatctttatacttgttattgtcactacaaaaaccaaatatcaaaactacttactatgttacttgtcatgcacagcttatgaatttgacattaccttatgaaagggttagtggaaaataagttgacaatggcaatcatatcagagactatatattttaaccatgtatttgaagttttggtgatgtgaaatccatgagtgaggtggagcctgactattgactagtcaatgtcagcctcagtcagctaggcacatacattcacactccatggcttaccctgttagaggccccttcgcctattcaaggatagtgtcactcaaagtcggcccccagctcctttggcaatatcacttttcttggccttatctatctatccaagtaatttccaattcagatcattcttataatcttacaatcttataattattctcataattcttgcaacaaaagcaggaatgttgaaagtttcctctctgttttacaattcagctaccaggaaaaggtctttaaagtcatctgagtttacatggtcagtgaaagatttcatcagaatgaacaagcagctagaagtcaattttgtttgacatagtgggcaactgtacttgacatactgttttaaattaatccaataggaaagacttcttggcgtgcactctaaaatgtagaagtttgacgtggcttcatcaagtaattaagttcaattggaaacattatttctttccttttaaattaatgttctattaaccacttagatatgtagaaaggggaggtcaagggagagaagaacaatggagaattcctggcacccagacattacatctggaaaaaaaaaggcacaagtggttctaacagtctgatccttggtccagaagcaccacgttcactcaggaacatattggtcaaatacaaggtctcagtctgaatcctagactccttgagttaaggcagggtataccattcaaatgatctgtgctttggcaagcatgaccctcatgcaatctaagctttcagacacacactcactaaggtgctgagcacaatataagtgatacattgctggagaggagccggcaactgcttcagaggcaggtgtggcaacagtgggctagagtgcttaggcaaagagtcacaattatatcatatatatcacctaaaggggggggggcatgctgaagaaagagactgggctgagcaaggcagtgatctgaggaaacatcaggagggcctggaggaagaaatggaaaggccaaaattgatataattctattttaattaaaatgcatacacataataaagtcaaaaggaaggggcagtttcaagggggagagaagtcactggctacaccaatgacttcttggctacccaagaaaatggggagaggatcagaagctgagataactagaagacacagaaatttgagaaactaagttaatagaatcaactgcatggcttttactctttgtggacagacgtttgtattgggccatttgagggcagcatgacaagtaaaggactccattgtaggcatgttgatttggagaagatgggagagcatgagagtagaagatttcataccgagtcaaaagcataatctagcaactgctccaagtgcagaaaaagagtgatgtgtgctgtgcttggcagccaacaaggcatacctactacccctcttggcagccaaggctcagagaggcagagagatggcaagaggctgaggttgggccaacctctgtaaccagtgcatctgaacacaatgggactgccacactcgtgagctcactgcagcttcagctacttacacaaggctgagcctggcaacattattttcatggaagagggaaaggtttttgtgcctctacctctccatgaaagactgatgacagttaatggtgctggaaggaagggtgccaccttcttcagcagtgtaaccactgtaggttaccattacccacactccagtaaataaccacttacctatgctcttgtgggcaactgtaactaaagacagcagagtccagtgcatagtgtctcagcctgagtctacttgtatagacctacaaataaaagcctacagcgctcaggatatgattccactaatgagtaatagttactctgatacctcctaaactggaggtgcttatcctagacacatagggtgaaaagatgaattggagcacaggtactcttacatgatactaaccaattctgtggttggattttatttggcattgtgttttgagttctatccggatagtcatacatacatatatattcactccattagtttatgtgtagctttgttttttgtgattatctttatagctctcatttctaaggtcatgccagataagtaccctcctagaaaatgaataaatttatcataagtagtgtaataaacaatatggaagcttcatacactgatttctaggtatgaatgtttgaacatagagcaacttttcaccctgcagagtctgtggctgaatgaggtttggtgccttaggctacccactctatttcaaagcccacttcagtgttagtcattcctcaatggcttttagttgaatgaatgaataaatgcatgaatgaatgaatgactctgatgaaagcattattatttttcatagatcatgttgtgagtatttaaatatttttttctaaaaccccgtggctggaatcaggactaacagtcaggggtttccaatactctgtccagtgttctttctattacacctttgaaagagctattgtaagagctctgttagggaaccaataggaaaggaataattattatgagttactaccctgatatagccaataaatggagcccatgtacctgtgtaattggagaaaattaacagccataagcagatctagggcttgagatttatcatgatcattgactgggtctgccttgtgacatgggctataaatgaggctcgtgttgtaaaggagatgtgtgagttatgcgggtgtgaggatggaggaatgagccagaaacagttccaatgattggaactgcttctgctaaggccatgggtgacctgattgccctgcctgtgtgtgtcccccactcctccaccttcaaccctgccttgcctcatgctcagcttgcttcttttaatctctcctagaagagtccttaaaaaggatagttgagctgaaccctgaaaaactctcaagcactcttagaagagagggcttaaggatttcattaggcacccaaacatcttgccaaccaccaccgagactggtgggaggggctggactcccaccgagattgattgatcttgactgtcaatttcgagtcctatcccagtttccccacttaaagaaaaatctgcctcttgattacctcctcaaaccctggatcccacacagatggagaagaaaagatggccacctagaacagctccgagtaggaacagagaatcctagttcccctgataaattggccaaacaagggattaggctaagccgatgagatacatgcattgcttgcttacttgcaaactgctgtcttagttatatgcttatgtattctctgtggtttattccatcagccgcatttagtaagggcttgttgaactaaagggttaactcaatttttgttgaatggaggcaagaaaccaactcagtgaccccaggggcctctttgttattgcctaagataggtcaccatacattttcttatatacccatagggaagttagagataccccatcggtccccatttctttggtaaaaattcaacattccagatgttctggaactgcccttggctcttctgtctcacattgtaatctggagacccatatttttagatctacaaacagaattcataaataggcaaagcatttctgtcctgctcacaaaacagtagggactgcagatttgtcttcaaaatattgtcatctgctggagatttcattgaattggatataatatgatagactttgtgaccagagtagtcttggatccttgggtttgtcagaagtaacctggggtattgtatcctcattcagacagatggaggaattaactatgatcagtgttcttgtagcaaatcacaagctggagtgtcggggagacccttgaactaactgcaagaacatggattttccatgaccattaactaagtagcagctacaaggacagccgcagcatttgttttgcttcctctgggtaagcctcctgtgaaagcacagaatatgatacaaagcttagtggataggtaacatttcagatgaggttggaggctggatgagtggaggaaagagctacactgggtacaattgcatcttgggaatctgtcagaagttttaacgtggaaggtagtgactcaaccgtgaggggatctgagagaaggagaaggaggcgcagtgcccgaggaagtagttgatgaaagagcatcgctttcaatgtgtgctgatgaaaagagagccctttctttagggtgagtccctgattccaattttacatttgtggagcaattagtagggctctgcttggccctccccggtcctgtctggtagaagaatgtctctgatatgtaatatttgttgtttgaaaagccaaagaaacgtgtttctttttctgagcctgccttactttttatgttctgaagttcactttggacctcggattttgctccaagcaataaaactggttggagagcgccagcataatggagctgtaattgtagccaactggtgggggcggggagagttaaggtgtgtcgtggtttctgtggtttctctgcagagtagaattccctgcaaagcttttccatgtggtgttttaatagctgccttaaaactctctgatgcatggagcaaaactgaattagactcatgtgctagatcgctgggatgggccaaggactctgaaaaatgaaacaaaacaaaaacaaaaacacaacaaaacaacaacaacaaccaatcaaccagcctaagccagaggctaaatctcccaaagaagatcctaaggatgtgtctgaagttagaaccacagaagcaagcatctcctctagcccatgtttgcagaactttctttggaaagccagcaacttccattgtaggtactgatcagatccttctgtacagtactcaataatgtacaaaatgaggctacattatttgtccatcagagtcccgcaccttcctttgaaggttgcattattgtgtctactattttttttttcagaatgaggaaacagagccttaaagattagcacaaggccatttgggtaaaagactgcaaggcagaactggatacctcttgagcaatgtgcccttcccttctggcagcacctcactaattttagagatcatgtttaacatttatgaagacaagagaaagcagccagccaatgagtgcacacacagtacagctatttgtaggctgctgagttctcattgctgagaatcagacattcacaactttgtcgagacatcaaaggggctcactctctctctctaactcagatctcagtgttcattccacagtgccaagagcagctgatagaatagcacacactcagtcagcctttccatgcctagcatgtgttaaagttctctttagtgtgtggttttggccacctagttcaagaagcatttatggaaaactgttatatggtaagtgtgtgggatgaatatgaagcagtctagatggcatgtcctagaaccttttctgttgcagaaaagaccaccattagcaaggcttcctctgaacgaatccgggaattctgggaatctttttttaatatgtgggtaccctgaagaaaaataaagtgttccaggcgatagaggcatggggtttatttacttatgtaattagcaaatcaacccttaagaccccgagtctaataggtggtaaacttcattacaccttgaaggcgtggtggagccagaattcagccccaggccagaaacttcactctctttccttttgttcttaagaactagccctgaatggacatctgtgttttatagagccacaaaaattaaccagcttaacgtgctgttccccctccaaacaatggacccatttgcacttttgaggcatagaaacagatttcacttgtagtgagaagttttctgggggacacctcttcactaaaaccaagtgcacacatccacagcttaaagctgcctcacttatctacagtgcattgtgttatattgtgttgtggttgtggttaatgttgcctaattaatttctgagagtttatacaatatccaaattgacagaaaggcacctcacgtcacagtctaatgttctctcccacaactcttgagagagacagagacagacagacagacagacagacagacagacagagagagagaaacctaggcactctcttccagggaaacaaattattttagagtcatgccatctttattattttcaaagagaaaattatcttacaaactatcattcaagtcaacacttgattttgacagtgctattattgatattctgatattgtttttccttgaatcaactataagttcactgtgcctgaagcatccatgttaggacaatgacatctaagagcagaagctccactccattaatattcatgatgtcagctatgcgtatttactgctagagaacggtctcagtagactcttttttttactcaatctttttagcaatccagagaggtaggtcttgttattgctgtctttcacttctacatggaaaacagcaatgttgggtcatttacccaggccctcaacagcttagtctgtcacagtttgaatcaaaccatgctatcttccaaaccaggactcttaatcacccaaggtgcaccagtgttcacctcgagaatgactgcagtgtgcaggagcctcttcacctgtcgaaggggctgctggaagtggcctcaatttgtagatactagggtgggaagagagagaggagtggacaggaggaaaggggagccaccagcttctctcacaggggttcctctgtatatagcttgtcctccacttaaaaatacataagattggtttatacctgggctaacatcagaaatatgtactcagcaatccatcctgccatgctgtaggatgctatgggagggagctgtaggtgatccatggcaataaactcccttgtactctcaattctttcttagagatggccatggcctctacaataaaaatgtcctctaagccagccttacacattcagctcatcctaaggtgctgctgggaaaataccaacagcctgcttccaggtagaacacccaactacagcactacctctgtggcagacacaaactccttgaagctcgactttgccaaagagagtggtggcccttggttcccgtgtacccctggataaagatgatagactaacatgagtgggaggtggtactgctgtcaggacaggtttaggccatgaagccctctactgaattctggtcctggtgtggtgagctgcttccttgggacatgccctctctcccactgtggcacttttacttgcttccacaatgactaaagcttacagaatttcagctccacagaacttgtggcctcttcatagcaggtgaatggaggaggagccaggacatcattttgatgagtatgggaaagaatgagaaggagggacgagagaaggactggctttggagttgatgccgttcatgagtcctgagcagtctacttcctcctacatcacatgcttacccgagttggtctcaggaaacgtgtatcaccaggtcccaaatccttgtaactgacccctggtagaactcacttcaggtcaaatccaatgtcttctgctcttggggactgaaggagtgcagaatgtgtaccccacagatacctagtgtgctactttctcacactttatgattccaagagtcaaagtcctcagagtgtccaaatgcatccccatgccttttttctttctattttctattgtgaaaacatgatagccaaatggtctgattcctaaataaggatccctcattgcagtacacactagtatatcaaactaagttttatgagaaattatgaaggctatgtaattagaagagggtctttgatacatacctgcttaataaggagagtcaggtaaagtcatgcatggtcattaatattgtacttgcttattgtacgacgtgtctaatattgaacctcaacttagtttacagttaaaaaattccttcttaacagatacaactgtagcagccagtttgaggtaatgaaaatatttcttctcctggccaaaagcccacactaacactcctccgctgatggagagccaagtcttcttttgaaaggaaaaaaaaaaaactagcatgagaaagacgttcacgaaccctgtccattcgatagtaggtggtaaatccacaggacaggaagaccttccttccagctgagcattgaccctttatattaaatggctctcggcaaactccagcttcttcagtgttgtgtggattttacttaggactcttatatgtctttttctaaggaaggttctcaggtcagttctgggtagaggtccacggacatctcctcccaaaacgtgctatagaaggccaccactaaagcagccttcctttgtccttcttgtatcagctgactgttcttgctaatggaaggaagaaatcacagacccattgaccaaaggctgtgtcccacttgctagtgaaagagttgttataatcacattagaatatggaatgcctagtgaaatttggagaatttttaatatatgaaagaaaaatagttctaaatctaccccatgtctgtgagactggagactctctgagctagccaagcctccctgcatgtaccgaatgctttcttgccttagagactacatgtaagtgtttgggttgagacgccctcctgccgggcttcaaattaggtaagactggttcagcaaatagaaggtaatgggttgtgtccatacatggtttcgttccacctttgaccaactttatcaatcacacagcattatctgtgtcacatatgtctccaggtagcagagagccaccatcattgtcagatgttggggtgagccagaaaaaaaaaacaaagtcccctccctcaccactgaatagatacagccactgtgtttcctgaagtggacagttttcattctcagctcttgtaaagtacactcaagcttcccaaactgtccaactcacctacaggtaggaatagtaccactaccgtacgtactcacaagcctgtgctcttggctgtgacatggcactgccatctccctctctcaaggccagtattcattcttactatatcatatttctctgacttcctcgtgagcttaaatctaaggactctgtttaactgtatgctgaagtggaagtgggatttaagtggaggttttttgttttttggtttttttggtttttttttttaaacagcattttcccaaattgtgtttgtgtcccattttttttctaaaacaatgtcctatttttaaagcagttgttgttggtagagatttggaacctgcagttttcctggaatgctaacagaaagacccagaagtatagtttagagcctcctttattgaggtgtcctccactcctccttcatccagcagtgtgcatgcatttcctagcatcccgctgccccctgctgcagaaaggagtttgtgcagccttccctgcaagccttccctggtggccttggtcactacatctcaggccactctatctcaggtttcctggggcccagtccatctcattagactgaaactgcagctctaagaacatccttcgtggatcctgcttcacaggacagaaccaatgaggaggcagctttttaaggcccagtgtttgagtggaaacggggccatgggtagacttcttagaccctcttaaatggggagagtgtctctgctctagcttaaatgaactctctcagtatgacatcagggacacctcaagattcagcaattaggaggaccatggattgaagaaaataaagaaagaacttgtttgtttttaaagcccagagcactgaacttctgaagagggaaatgtggaggattgccttcacctctcaccctctgtaagataccattttaaaaagtgtgatttacagtgttttaagggttgaatataagtcatttctgaaggcaccatatacttttacaagtatcgtaaatttcatcaattagtaacatattgttaatatcactctgactctagtgacttgctctcagaactgtcctgaaacaatcaggtttgtcagctttcagtataatcgtgagatggttttctgccaaaattatcttaatcaaggtgttgaccttctgggcctgcctttccatctaaagtatagcagtgtgcctatttcacggagtcacttagggtgcagggtaacatgtgcccggcacatggcagatccacagtaactgttagttccttcctccgcatcccctctttcttcttgtctggaatggtcaacatctgcctttgacactggattctaatgggtaggtaggctacagcaccctcttctggaattgcctttaaaagagctgagagacaaacctttgtcaccattagatttcaaggattggcaaagaaacgtgcagggagaagggggcagtgggagcagtttttattgctgaaactttaacacaccgcctaccatgagcaatgaatacttttccatgagaacggaagagactttcctccttcagctctctctatagatgcagctataatgggaggggtaaaagcggtacccagtgcaaagagggtcagtttgtggcaatagaatccttttctaaacaatttgttttatatatatattatttttcatccaaaaagattgttttaaacttaataccagagtttaaaacaaaggcatgcctacctccatgcatgcaaacttagcacataaggaaagcatacagttttctatttccatgtgtggttatgtcctcccaataacactgaacactgggtggatcttgttatatagtaagtttccatggagaaacactgcagatagcaacactgcagacagcagcactgcagacagcaacactgcagacagcaacactgtagacagcaacactgcaggcagcaacactgtagacagctcctatttgatggcaaggaagaatggaccctgtgcccctcctctcacctggattctgctctgacacccgcctgattatgagcaaagcaaagtacaaaagagcctcacaaaattacacaacaacaacaacaacaacaacaacaacaacaacaaaacttcatgaagacttcaggtcttttggcagctgcccaaagtaggatttactccattgatgtcaggcctctagcggtagctccagctagcagttctcaaccttcctaattcctaattcctcctcctaaatgctatgaccctttaatacacttcctcatgctgtggtgaccccaaccataaaattactttcgttgctccttcataactgtaattttgctactcttatgacttggaatgtaaatatctgtgttttctgatggtcttgggtaacccctgggaaagtgtcatttgaccccacaaggggttgcgccccacaggttgagaaccagtgagctagcaaatagcttagatattgctatgcccagctatcttattttgcacaggaggtcattgaggcctggtggggtcatgtggctcgggtgcctttccttattttcatctttctttccatggtgtctttgttatgggtgctacctcccccttgagactgtttctgttcagaaacagaaacccgccttcttgcaaacaccaggaggtggagagggataggagtaaatgcacaaagcccctcctccatcttccagggatttaccttctccagtagaaattataagagacggagataaaagaatcaaccactggatgagatccttgccctcagttacttgtttctttaaattgtgtgagacaaaattccatgttcaagaataatattttacccatcttcccagatgtgggaagaatccttctgtgaattagcagtctcacttgtgttacagtagtaggagaagatgtttgctggttctcactagcaactcgctcagtcttacccaacatttaccaattactctttgaatttcttataaatgtaacactagagtagctgtctaaagagaggatcaggaaatgaaacaatggctagttactgttttgagacttatttttaatatacatttgtggcatatgaatcatatattgattgcaaatgcaaacttggggggaggggcagcattttactgggatgtaaaccttcagaaccggtatttcccggtttcttaagaaaactggttgcagtcaagttgcatgaaatttggcacaattctgccgccttgtggctgctttgataaatctctcatgtagtccaaggtcagttctgcctttgagtaaaataggaaacatatcctggttttcagttcagtgcctttgacacaaagctacccagtgaagaccacttagccgctacctctgtctgctcttgtaacagaatgattggaaggcctccatcgccttcgtggttgggaaccgagttgaggatgatcttctcattcatgcccttgacctggctgttcgactccctcagcggaaactcttcagtattgtgtcatgggaagacattctgcagcaggtacctgtctgtccctttctgcctcgggacatccaaagtcatccatccttccttatatttgtggattgaaatgttagaataggcaacagtgaacaaagtagtcctggactacttggttatttgtgatgggttactttaagtgcgcaaacccaatgtaaaatgttgcatttggaagggctaaccttctcatcaatgcagtccattggaacttcatcccattgacaaagatttctgtaaacagtccaggcaccaggcaaaggtctctgaggaattatttagtacggagttagataataatgaaagagtaggctaaataaggcacatgactaattgaaaaaacgatatctatagaaaatccaagctggctcaagtcagagggcaatgcagatagtggagaagagctgtcaggtggcacaaacatgtgcgagtaccagcaccctgacgagagaggttataaatactacatctactgtcttgctaagttccctagtggcttaatttaattcactaattcactaatgtattagaaagtttcacagatctgtgtgtccctttaatctttcattcattacaagttaactcaacgtttttgcagatggatgaaatacagtcacttgctgaaagtgcttcagctaaaaaggggaaaaagcccacatctgtcaatttaccgttacattacgaggtgagtaactgagtctgtcaaagagacttttgtaacgttcagccatggaaactgaagtccatatgacactttaaaaaattttaattcaatttttaaaagtaaatttccactatccattgattgtttgttcctcatatacacagacacatacacactccacaactatacctttaagaatagacctacctagattatttacactatccttcttcccaattgaaaagcatgaatcatgggtacttaccaaaacactaggttgtactttcctgggataagtactgaatatgtgatggtattaaagagaggcattattagtgttatctccttgatagaaagaggaaagaaagagcgtagtctgaccaagtttcagtgtagttgttggtagttgagaatactgcaaatggcttggcattaatccttgacacaccgctctctatgttttggcaaactaactctgctagcagtcaaattccacacctcccatcattccttgcaatgttctgaatgtgtgctcaccagttgaaacattatgtgatacctggatttaaaatagtgggttgtttttttttttttttttccccttctgaagtggtcaaggaaatccatgtccaagtatcaggcctgggatcaattagaccccccaaaggattctttcttcttcaaagatacccagtaaaacacagagatgataacagggcagttttgacgtttaatctggacaggcattttgacttggatgtgggatagcacaatgctacaaatccagggtttgtttagaaagccatccttcttcaacatgtgctagggctcttggttgcatattcttcactcaggggaggtccctctcacatctggctcccccacattcttccactggagcatttgggcaagaagcctcccacacttggttttctgaatggttccagaaggaaaaaaaaaaagcagggtggagcaccacagagatcgggccttagaggcaccagaaattcattaccatcaatcactggaagaagaatgacaaagagcataaagcaagcacaggctcctggtcagcactggcccaggacaggtcacatctggagagagatacatttgcatttctcatctcacaactgaaaagacttgatcagtgcctgggggtttggggggccaggaaatgtaagttgccatagaagaggctcagaagcaagagtcttctggagcctctggacatttgagccaagcggacagcctgctcttgagtccttttctgcatgcaaggtatgtagcaaataggaaatctctacagacaagctccgtagacgtaattaggaagtcttgcatttcctattccaaggaaacttggccattgggaaaagtgagagtatagtaaagtaacttggcctcgggggagttcgtgagccttgttttcttctagctctccattttggatgaagagcttaaaattatcatgaagacaataaatgtagttacatattcatttctacttgtaggagattctccttgactttaaaccagagtctcctctttcttgctttaaacagagttaacctgtgtgactccctagtttgttagcttgtgtttggttagtagccacagttaaaacaagaccccattacagtgatgtttatccatgagcagtagatcaggtcagaaccatattacatatttccagtggagactcgccatgtctgtcctagcaaagcccacattcctgagtgattcgctcaaggtttcatttgaatggtttggtgttatatacacacagactcatttaaaattgtgcaatttcccctgaaatgttggaatttcatctagccatgatattgtatacatggccatctttatttataagccatagtcctttgaaagcctacttagttttctccgccagaggtatccctgcaattcctctgtccattcaccttcttgctttgaaaaccatgtcctgatccccaagtaccactccaggcattcatccaggaatgtgaagagaatagtctccatcatgtatagtctcgggagtgctagagcggttattgttctcaccacccactactgaggatggagatgatcgtttgtcctgagcatagcagcatccccatacccggagctatttaaggatatggatgcacatgaaagtgggtttatacactgttaagtttggccaaatactggcattgtacaaccattatctggacagtgcacgaggggacagaaatgtggatattcttggagcttaagaagcattaggattatagacaaaataaacagtaaacatataaaactaggctagcgtgcagtgggtattcatcagacactcattaaaagaatagataacaggggcaggaaataatcagtggggtccggaagagacaggggagtgtccagagagctaaaggaaaaagagtttagcattagttagggcatgggagaagagattagcattagctaaggtgtgggagaggagccagagaagttctgaagagacaactggcacctgcagagaaagagaaggggtcgtggacattttgatctgtataagaacaaaacaaaacaagaagaaaagttacctcacatcccaatctaaaaggaaatataaaaactacccatttcatacatggggaacctgtgttaggaagtcttgtaactagaagatctagagttagaagctgaaataccttagattgtgccacaggtaaatacacagcttcaagttttcctattttatcatggaccctttcatttgcctcaatgctgactaatgtgggagggtatgtcctgacgttcaaacgtagaaaagggaattttagggaaagagcagataaaacagagctacgggaactagagtggtctctgtgagcgtgagggaaatctcaatgagtatgagaaaagtctcagtgaatgtgggataggtcccaatgaataggcactaaacttgtagctccacaatacaataaacactagctaggaaaggataaatcctggatgtgacactctaaacctgtgaagatggagatctgcaagaaagcactttttaaggtcttgggtgatggctcagcagttaagagcaccaacaggtctttgagaggagctgagttcaattctcagcacccacacagctgctcacaaccttgtgtaactgtacttccagggaattaatgtcctcatctggctgccaagggaagcagggatgtccatggtgtgtgtgtgtgtgtgtgtgtgtgtgtgtgcatgcatgcaagcaaaacacctatgtagggaatgaaagaaggagggaggaaaggagagagggagggaggaaagggaggcagagtgagagaatgagaattttaatacccaggaagtatgctctttagattccaactgaaggtgcatttgctgagtgcacacatccaggtctttttatgtgcatctatgcttcatgacccaagtggagaatatatacgcttttttcttttgcaaatataccgagtcctgactgcaaattaaaaggaaactattgccagtcattccagatcaactcaaatgtcttaaggtctgtgtgtgcctaagtctaagttcttacacatgcaaatctgatgcacaatgggtgaacatcttaatactgatgcacaaatttcaaacttgatgtaatgactgaaaaacgaggaagacaaagccagggtgagacagtgattatttctacagtacaatcaactcagagtttcctatcctaaacatcttttttttttaattttttattggttattttgcttatttacatttcaaatgttatcccccttcctagttttctctacgacccacccgcatcctaaagatcttaagttacacactacaagcattttcattttgtgacagcagctgcctctcctgcccagctggacatgagctgaggttggaatggctatccatggcttccttagcaaagacatattcggttcttaaaacactggttaaaaaaaaaaagcactaaaacaaaattgtatataaaggggatttataccctatttgttgaatcaattttcaatttctatacaataaaaccagggataatcctagcaactacatgatgctctgcatgttgtgcctgtgaggaaatattaatttctctcatcagtaaaaaaaagtaataataatttactttttaacaatttcagactttttttgttgttgtttttgtttatcaagaaagggtttctctgtgtcactctgactgtcctgaaacttgctttataaaccaggctgaccctgaactcagagattcacctgtctcagcctcctgaatgccggaaataaaaggcgtgcaccaccatgcctggctcaattaggtttgttgttgtttttccaaataaaagtatttttatgtttttttttaagactaaacttgaaaaaatgatggcattagtttcaaaaataacataccaagtactgtctaagaagatgagggaaaggtagagagatgggtcagggcttagagcagcttctcattccccagagtggctagcgtgtgtctcccacctgcctgccaagcagctcacaacaatgctagctccaggggatccgacaccttcttctggcctctgtagtcagtgacacacatgtaggatacacacacacactctcgcgcgcgcgcacacacacacacacacacacacacacacacacgcatgcacacacgcatacacaaccaacataagcacataaataagagtaactataaaaagaaggtgagggatccaaatgctctgtcttcaggtctcatgttgtccatttttaagacattgctgctgcattggttacaatgtcctgatggatcaaatactcccgggttttgatcctcagctcctggatgcgaggacatatttctcagacttgccccaacaaggtctcaagagtcgtttccaagaatgtagattgttacagagcagtaggctgctatgttctggattcctagcttgcaagtcattccttacactgtgcttcaggtaagcagtccatgcagtaaccatataagcctttatattggaggtgaccttgtcaaaataaaaaaattgacagatgcttcaaatataggaacaaatactacgtgaaattttaagaggtttgatattattaaaatggcagctgttctgagaccagaaggagcagtatgtcatgaaagcaacaaggaaaggggcagggtgggggcaggaagagttccctggccttttcagtcctgagttttaaagcaaaacaaaaacattctggaagacctggagagaagccaagctaatgccgttattccatggagcttagggacccaccaggaaattacaggccagttagtttaacttcacttgtagggaaagtattaaagactgcagcaggagatggagtgggaagctgctcagtgagctagggcatgattatggcaagcctggatggccatgtcctaggaacttgttgaaatgctttgaagctattacagccagtacaaccttcaaaggatacagtggagcccagaatctgtgcatccttccagccctcctgggacacctatagaatatggcccaagtacagtctccaggtccagacctctaaagccactatgaaaaaagggagaaaataaccactgggtagaaacattttgaaaactggaaccaattaatacagcttgatatttataaatgtaaaataatgagacttggaatcaaatgtaggaatattgagctgtaacaaagaagtaccaccttgggactataaaaaaatcaccctaggagttatagcatcgaaatttggctttggatctgacattcgaccaaaaaataaaagatgtggagagaaagtgtgcaaggaaatcttcacctagtagaaggttatgaagaattgcaaccaagtgaactttgtcaagttgatacaaagagcagtccaatgaacttggggcctcatatgctgaaggatgccagagcagctcaggagaaaaagacctgctgggcaggaccaagctgggcaaggaactgtggaaggtcagggctccattgcattaggaatgcacttctcgggggggggggggagttcagatttaagacctgcagttctatttttaaggaaaagcaccactcagacaaaggtgtccacaaaccccccattgctggccagctctcctccaccctaactttcaggcaactaaccacaactacatggcaaacagtcatcagtcccgaggaatgaggtggacatggttagcgccaagaaacttgagggtcaactgcaggctgactggccattttgtttggagagtagtcaagacagggatccagtcaatatttttaagatatgagtgtcagtggaggatcagctacaaaaaaaaaaaaaaaaagcaagattctgctggacatatgtggcctctctaacagtctatacagcattggtgcttaaatttttcaaaacctactctaataagggttcttaaatgcttcaacctctcttctagcccatcacccaccaaaagtagtggaaaagaaagagtaacagaaaacaggggttatagacctgtttagaaatagttcattggggctattcatcagtccagttcatgaggcaatcactactcacaaatcagcaatggctattccannnnnnnnnnnnnnnnnnnncctagaagaaaccatgaggttccatcaattggctggagtccacagaaagagcaagaagccaccagtatatcatgagaagttttttttggcgagttaccttctaggaagtcacaacaagcaaagattagccacaaggatacaaggcaaagactaatgaggcagaacagggtgaaccaatgtcagaacctcatcccactgtctatggggtcagatttatattctttgtgaacatcatatgtcctttcatgtgtctgcctcagcaaaacatcctttcacatatctgcttcagtaaaacatcttctctcctgtatctgcttcagcaaaacattcttttacgtgtctgtgtcaaccatctttctcatgtctgcttgagcaaaacatcctttcacctgtgtctgcttgaccaaaacatcctttcagctgtctgacccagcaaaacattatacgacataagtaagtttccaaataaaccagaaatttccacttcagtccacagccctagagttcatcagatagatgctgcagaaggcatcagaaaaactgttttatgtctgtagttaataagactgaataatccacatttgtcaagagtggtaatatctagcatttcatccgccccaagctttgtatgaattggcttagaccctaatcctatcatctacctatcagaagatacgtataggtcaattaatataggtcaattaatgaccgcataggttgagtaatttgttgacttcaatgacactcctccttttacctatatcacatgtgacagaaaacagttaaaaatctggaagcacttgtgaattaacagtgtcataaatagataacgctagtcaattagaattaaagtttaaatctcttggtagctatctgttttgttttgttttgttttgtttttcattcttcctttgactcaaggaaaacacaaagaaaggataaccacagtaaaaccacgcgataggtttagctgcatatttgggctagtctgatgagttccttttgcccaaaatgtttggggcaacagggatctttcatttctgtaattaagatttacataattatggtaactgcagttcacatccaactcagttgaaaattgaaaggccagggttctgtctgaaatgccaagccattggagagagctacatcctccatttttgacttggtaagacacagacacactgagcagacacactagtcaatccgacggcctgggttcagccttctctctagggcttaccagacctgtaaccttaccctgcacctggagttttccctctatgaagcctgtaactaagaacgttgacctgtggctgtgactaaataagacagtgaatagaaaacacttggtacctggcattgagtaaatatccatgaaagctagtgattattaatacttttaaaacaatttctattgtcaatcaaaccaaatgctgttatcttgcagtatagggatcataaaaatactagaaaggcaaccacaagtcttttttggaagttaaaatatttttgcttcattaaatatttattatttcaacatgtgtcagaaataaaattaaacaccaggatgatggttctatgggcaagattacttgttgcacaagcatgaggaccagagttcaaatccccaacctcactataaaaacccaggtgtggacacatgtacacctataactccagaattccaggaggggaagagacaacaggtttgttgggaccaaattgcagccagcctatctccaggttcagttaaagaccctgtctaagggaataagatggggagtgagacaacaggacacctgacattctcttctgctctctacatatgtgcacacataagtagagatatgtgtgatacatcacacactcacatacagataaaaatgttaactaaatcaataagactaccagcctgaaattttctcagctttatagcctagactaggcctacattgtttcttaaaacatgatttatacttgacttaaacagaggtaatatgttggtcctgcaggaggcatacagctttggctaaagaatccaatcaattctcatcattaaaatacagaaaatgttgaattttccatgcattccacatatatgtgatggtctattaagaaccaaatctatggttgtgtatatggttgtatatacggtgaataaaacagatataatgccctaccctcaagagtttgctatatctgaatatgagctgcaggcattaagcaaaaacaaacaagcaaataaaactgatgtgtaaacaattatgtactgaggtaattaggtatttttaattggagttaattaaaggagaaaatactgtagatgaagaagaactagttaatgttgctgtgaagaaatatctgaatatgtgaactttatgaaaagggacatttatctgacttattattctggcaaccagaaggtctaatcagcatcatactgacattttccttgaaagctctcacacactgcatcatagcatggccctgaagcagaaaggaaatcagccatgtgaagaatgagcatgtatgttcaagtgatgttggtgagggagcaggagaggcattcttctgtaacaacgtatgtttgagagacttccctggaaagcaagaaatgactctagggaggaagcagcatttccaagccaatagatagcatttcctatgagtaccaacatcttaagagtctctgtgattctcagtactaccacaatgggacagaacttccagctcgtgaacctttggggagccagccacagccagacatcaacagatacaaacaaaaagagaaaacgaactgatagaaaacaccagaggaaacactcaggcacagggaacattatgttaaacaatgtggtggggatagaaaactgttagagaaataaagaggacagtgtgtccaggacatggagaagggctgtcttaggaacaaactcacatctttacccaatagaaaaagaaacggtgttaagattttggaaagcagatgttctgagaacgttttctggttgctgagtatgcatgtatgtaagggtgtgcacctgcatgcaatcccacacgtgtgtgctgcgacacgcgtgcggtggtcagaagacaactctcaagagttggttctgtcttcctaccatatgggtcctgggtcctgaactcgagttgtcaggtttatgacaggcatattttacttgctgagccatcttgccagctcaacaacacttttccaataaatataagtgactttttaatccaatagccaactcttctaccctgtgtctatgtttggtttggcacttcttccttcccttgtaaccgaagatggagtgaagagtggggattgggggactagaggtcacactccagattcacagaagcatgagaattgctaccacagttcagttgcagctgtgcattgtctctcaaccaggcaataggtcctttggtacccgtgctgcatcttggacagttttggtgtgggtcctacccctgcttatccactgtctggggaccactgccctttggctggaagttaggtacaataatgaggtcgaccacaagctcgatgaagaacagactcaattagaaccagggtttaaacacaaaatgtttatacctggcttcctacgaggtattaaaatcttacagaatgacagaaaacaagcgcactgttgacacagctattaagtatgagctcaggagggaggagatcgtgtctacctcagttctgtttctgttgccctgcacatggtaggaactctgtatgagggttaggctgcttgaggattaggctggatgaatgggtacctgctatagtctccagtctgcgcttaggtgagactgggggaggagcatgcaaaaggacaaatatacggaagatgatatagactctaggccactgcccctttagactttgttcacctctatagcaaaagttataactatagcaaaaaaagttttattttaacaaaagttttcattgtgtatcacttgcaaaagccgggttgtcaaccccagctacaaaaccatcaaatatgcagccaataaagcaagctgcaaagagaggggctcctgagtcatggttgtgagtatagcccacgatggattcctggtcgctaacaggaggtgacattagttttaattagaatgttaattcttattcataactgactgagcaaggcacaggggaagaaaaagatttcaaagacactggaaaaacaactgactttctttttgacctctctcatcccatatctccaagacatatcagacttaacctactctaaaccatgtttccagcccttccccaggtttagcctcctgttgaagtgctctgtagcatgaagtatgcttttcagcttcttgaggcagaactgcagggtcatgcctgactcttttcctcattgcttacagcaaattagcagccatcttccaagttggcttcctgcatacctcctgaacttgtgtgtttgccatcttctctagcctctacaggcttacccagttctttgctttctacttaaatatttttaaatgcactgcaaatattagagacactgaatgcatcttacacaaaaatatgcttgaattcatttatccatttgacccacacaaataaccacaaaaatactctcggtggggctggagaaatggctcagtggttcagagtactctgttattccagaggactgatccccagcacctacatcctggcatacaaccatctataactccagttccagaggagcaagtgctctcttctggcctccatgagcaccagacatgtacttggtatgcaggaatgcatgcaggcaaaacaatcatgtactgaaaataaattttaaaaagaccactcaataccagatcaggttcccttctatgcacacccgaccccctccccatcctctttccctcccggtctctccctcccacccttgagattgctttattctccctcctaagtgggactgaggcatcctcacttggggccttcagcttgttgacttttttgagttctgtggactgtatcttggcttacctcactcaagatgatattttctagttccattcattggcctgcaaagttcaggatgtcctcattcctaatggctgagtagtattccattgtgtaaatgagccacattttctgtatccattcttctgccatgggacatctgggttgtttccagcttctggctatcacaaacaaggccacgatgaacataatgggacatgtgcccctctggcatggtagggcatcttttgagtatattcccaagaatggtatttctggatctttaggtagatctgtttccaattttctgaggaatctccagattgatttccagagtggttgtaccagtggattaccagtttgcaatcccaccagcaatggtgaagtgttcctatttctccacatccttgccaacatgtattgtcacctgaaggagaaaaaaaaaagatcactcaaaccatatttgtagcattataatataaaggaactataacattatctctatgttatatcaaatataagaatataaaaatataattatggctttagcatcttgcaacataggaaatcaattctataaaaatcttatgcataaaaactgaaattctttcagacaggaacaattatgggtcagagatgtaactatggaatggtaaccccatccctcacttgatgccctgtcttcctgctggaggtgggctctataagttcactctccctactgtcagacatttcatctaaggtccctccctttgattcctgaggtctctggtgcattctggagcatccctcccccaacctcctatttcctaaggttgcctgtttccattctttctgctggccctcagggcttcagtccttttccctcacccaataccagatcaggttcccctctcccccaacccgacttcccccaccccctgtccactttccttcccaggtctctgacccataattgttcctgtctgaaagaattacatggatgggaatgaagagaggagcctgagaaaaagaaggtccaacgacaggcccaatgtgggatccagctcaaggggaggtcccaaggcctgacactattactgaggctatggagttctcacaataaggaacctatcttgactgccttctgaaagacgcaacaagcagctgaaagagccagatgcagatattcgcacccaaccaatggacagaagcagctgacccctgaattagggaagactgaaagaagctgaggagaagggcgatcctgtaagagaatcagcagtctcagttaatctggacccccgacatctctcaaacattggaccaccaaactgcatacactaccaaacaacatacaccagatgatatgaggcccccaacacacatacagtagaggacttccaggtctgtgttcattcagaaatgatgcacctaaccctcaagagactggaggccccaggttgcttagaggtcaggtggggtcgggggtgggggcatccacatggagataggggggtgaggaggaggtataggatgtggagcagtgggaggatggataacgggtgcagggaatggaatatggagtgtaaaaaataaattaatttttaaaaagttatataaatatatatttgttataaaaaaaaacctaaaattgtttaaaattcatgtttcaacctcatccttatttggaggctgtttggaagttatccgactcttacagtgagccaggctatcaggaagcctgcagagccccatggccttgtgctccttaacccgtctaagcacaccatgtactctcgttgtcaggagtaacccgagatactcagcacccacctaggattgtacacggctgtcaagagaccattcctcagattacacttgtatggggacatctaattatttcagccaatccaaaggcctgcttttatcctttcagtcctcactagagccacagaggagtatgtcaggggacaaaaaggtgtgacacagtcccaagtcacaccaagtcctacatcctttgtgagaagctgatcttgtatttcatgctctcaggttcaatttagaatgtcagggagcagggagagagaccctatctggatttgatgcaagggactaatatattaccttttgtaactaataaaatttcagaggccaacagcaaatttctgatttgcttttcctccagtaaaatgtctgctttgaattatgcagaaagaattcttcttgccaacttgtttcaatttcccacacaaaaccatcacagaacactgtcaggggcttcctatagtggcttattttaggattcttcagccattggagaaacacaggagcacacacacacacacacacacacacacacacacactttgccctttccttgcagaatacagaggaaaatgtgttgttgaggcttttgtatggtgctttccttttccaaaggctgggatgagtattactcttcagactcagaaaagaaactcagtcttgccagaatcccattttatgaatgcaggcccgccctgcacggaggtggagaggccatcgctgtgtgatgtgatttaagaggtgctggatattctgcctgtccaaaaatagcccccacacccgcctgttgagctcagacaaactgtccataaaaccctactttaaatgaaatgaacctgcagttctggaatgttagcccattacatccgctatgctttcagcatgtatttatgcttcgggaggaaagctagctctctcaaggggctatgcatgtgccccagtggtgtgagaagagttagcaagacagagggttaaggtagcactgtaagccaacggaagcagtgtcagcacattgccgtggtgggagcatgttaaagcgcaattcagtgtctcccatgtccattcactcagtattttttaaaacagtgttttctgaaccaaatagtcaatgatcttggatgaaatcatcaagaatacaataataagggctagagagatggctcagtgattaagcacactggctgctcttccagaggacccaagttcaattcccagtacactcacagaacctgaaaatcatccgtgattccagttcctgggaatctgatgcccttacctgaatttcactgcatgcatgtggtgtacagacatagattcaggcaagcattcgttacatgtaaaataaaaatgaatacttaagaagctctggaactatgtattgggaatggttgtacaattgtatgaatgcaaatggaaatttttattttcagccataacataaaggaaagggttagagggttttttttttcttgttttctttttaaccattaaaggaaaaatgccaaacacagaaacatgagtcgggttttcctatctatcattcatgtgattcctttaaaaggtgtgtgtgttggggggcgggggggatctctcacatagaatactgaccaccttgcataaacttataagcccaaataagcaggggaaagaaaactgtaaaacggcagacatcgactttaaatacctctagaatcacttgaaacttggggtactgagaagagaaaaggtggggttggtcttgatcaggtattgtgacacgactgtgagatccggggcccctcccaaaacagacctgcttcactctatagccaagcacaccacctacatcatcatgtgggtgttaccagcaatgcttgtttatttcactctttgtttatttgtttgtttgcttgtttcaggggaagggtctcactatatagtcctggctgctctggaactcacgatgtagactaggatagtcttgaactaatagaaatctcagcttcctgggtgttgggattaaaagcatgtgctaccgcacccaatccattttttcttttctttttttcaaaaaatattatttaataccaagacagttaaaatcagaggctgcccagaatttgatagataacttttatccataagtattgtttgtctcccagcacttgcagaacaattacataggcaatatggcatcagtgaatatgtactgaccaaatggaagttgtcgcaaaaggccgctgtgccccaaacttcacagtctgcacacagtaacatcatatccacaacctgaagaaatggcgagccgtagttttcacctcatcagacaaagatacattcacaagcacagtgcttccagttcaaagacacaccaggactcttgtgtggtttaggttgtgagggtttaaactgtcaccactgacgccaagaacttcagtccatttaacattgccaccgccaagccttcaacaacttgatcagaaaacgagacaagcattaaatgaacagaggagcttcagaaggggactgtgggggtggggaacacagagatcaagagtgatgacagcagaaaagcaacttgtagcagctccagcggggaccctcagaactctggggcagggaagagagagacagagatagagacacagagagacagagacaaagagggacagagagagacagagaggggggagatagtgcttacgagaggaagcatgtgcgcacccaggcatacttacttgctgaactagtgaagtagcacaacttactaccctaggcttcctgcaaggctgatctgggaaagggagtaggcgtggctgcatgtcagcaggcatcaggcatagggtgcccttttatagggcacaggctgctgagtatctctaggagatgttcatgctacttcttaaacccagcatgtgttttattggttgcttatgctattggttgcttaccatgtgttgacacaaagctagcaccagcctttaagttccttgtaatctaatgaaaaatggatagaaatgagcgagctttttactacttgataagcaagaagttgttagtgacacagagagtacacagaacactgcctatgtctttcttaagttttgacagaaagggctaagaaaatgtgttgaaattggagtggacaacttatgaagtaatgctaaaggaattcttagcaatcaagcaaacagaacaaagtattccaaacagtgggctttcctggcactgtaggagggcaagtggaaagcacagccctgggagctcagcaggtggatgcaggctgggttataaaggagctctactgtactctgctataatgtgctgcacaaaatttaggcctgagaaatacagaggatctaggagcatgggagggcctctctgggcagtgacactggatggaggtgcaggaattttgtgggaggttggaagggtagcaccatcaacagtgtttaaatatggtatagtattttagttgtatgtgtatgttgtaaactattttaatataatagcaatataatttagttataaaaattatagataatttggaaaatacagtaaaaccataggtcatatactgaaagatacttaaatatatctgaaatactatactgcgtggagccctatatctcttttcaaaaatggaaattatatgttttctattttttccatgcgttataatgttaagtgttgtctaaatccatattcgggatgtgtgatggaaagtatgcttctattcaggaacatatttaactcctcacatctctgctaaatttatactgtttaccaatacttataattgtttccttatgagagttttcataaactggaaattccaggtcaaagtctacaaatctttccaatctcttgacacatattgtcaaaatgcaccagaggtaatttgagccaattcacattctttataacaattccaatataacctcgccctcttcaacactaaatttctaactctcaatttgataaacaaactattatgcagttggatatgtgaccatatttttattgatcatgtcttttgaaaaagtatggaatttatcagtgtgattttgttctcagactctctgagataaggggataccccaccaactgttggaattcaggatggggaatgttggctttaagtaatttcaaagcaaacttcaagtgctatgagagatacaaaaaggttatccagcccaatgtagcctcacagcatacttcaagatgagcagacacacagaactactaaaatttcagctgcaggagtggacacaaaagaaatacaactgagacctccatcaataggactagggacagcaatctcaggattgggagtgtgggaagggtggcatgctctttgctttgagcttctccatttctatcatctcacctcctgctgccagcagctctgatgtggcattctttgacatcgtctggaggacctgttaaaggtgctgaatccagtccagaccccagtgatgggcactacctgagatcccactgtgcacagagcttcttcgtctccaaccacatacacagagttgggaatgcttctcaatacatggatgatctgaaaaagtccaactggggacaaattgttcttttgtaccacgttaatgcgttaccaagagcatctccatgttggcagctcgatagatagaagggaacagggccaggaccacacataaggataggtcagccactggacaaggctctgtgtgtatgtgtacagcacaacagtatccgctctggagaacccctgttaaccccaggctaactgggaaagccaggtggcaagatggggagatacacatctcatttgatgcatccaacaattattgcctaaccatctctacttgcagctttgaatttttatcagtggaaaaataagagagaaaaggtcagtgctttcctgaagtttgctactgaactgtggacaagtggaaaagacagaggctgtggagagaaacagagcaagagcaggacatggaaggagtgggcagtgatggcaaaggcgagtggtgatgtttggagtctacggagatgcctgtgtggtgatcaaggaaaggagtggccctaacaggaggggcgatgagtgtgagggccctgaggtctgagcaccaaaaaggaagtgcaactggaaaagatcccagggaagaaatgcaatgggaacacacctggagccatgagcgggtcttggaagggagccttggttagacataggcatgctggtttgagcctagctagcaaataagattttgctctttaaaaaacattgtgtcataattcagcccaagaatggtgtgtgtgtgagagagagagagagtgtgtgtgtgtgatgaaaagatgtatcagcagtaaaagtcaattactgcttgtcctggttggctttgttaaattaaaacaagctaaagttattttgttaaagaatttcagttgagaaatgcctgtatcagattgcctgtaagcaaatctgtgcattttcttgattagtgattgatgggtgtgagaccagcctactgtaagtagtgcctggcctaggcactggtcctgagttatataagaaagtaggcaggtcaatccatgaagagcaagccgatgcttctgtttcagttccttccttgacttcccatagtgatgggctgtagtctttgaagcataaacagaccctttcctccctaagttggttttgttcatggcattttgtcacagtaaaagaaatcatgcctaagacattgctcttgcagagaatacaggtctggtctccagcacccacaaaaaagcagttcacaactgcttatgactcaagttccaggggatccaacaccctcttctggcctccgtgggcacctgaatgcatggggtgcacataaactcacacaggtacacacacatatataaataacaaataaatgataaatattaaataaataatacatcatgccaacaagatgtcatgatgataacacactcctacacacctaaagaaaagtgcttgcctctccatcctgtacactgttgtattagaccctaccattatacattttatatggacacaaagtactccttaatggacagaaggtttttctctaaatccccacaaatgtttctctaggaggcatgtgctttttgacatggactgtatctgttagatgttcaaaatacccatctctctggggagattcattacagttcaaattatacatgtctgttaaagcaaagatcagttctacctttcacatatttgttattgctgctttctgaaacttccttccagccccaaagaggtcttaatccctgtcaaatgttattaagtcactagcttttatatagtcttgaaagggattgtttatttaacttcagtgagtccttgttactgccaaatattatttcatttcagcgcagatgtaaagggtccaatgactggaattacttcacagccctgacactgtggagagatggataccagtttaattatggacagctgagaataatctgggagtcacctgctctggatatttatcatcattatgaacttctcaccaggctgtggcccgaacactttcataacgtcccatttgtgttgggcagacattatgatctatacagaacctgccttgtctgtcacctttgaatttatggatagacaatttaatattgcttgattattttcttttcctcttcttggagtgagaaaatgtgtttcagtcattcctgttccttttcctttcctctcaccccccaacccccgtctcaacggcctgctcccactgctgcctttgtccttccagctgcttttccaattatgcttcattggaaattattcattacttaaagaatgtgacctgggtaggctagacgcatgaaggaaccagcaatgcggagactgatatgcaatcagcactcaataaatgcagtggaaatgaaggaagagagcagagggaaccagaaggaggctttgaagctacagagtatttgccatagactgcttctatctgaccttgtagacattgtaaagaaaagcaaggtttctctttctacttctaaggtcctctgcccagtgctctgtaactacacacacacacacacacacacacacacacacacacacacacacacacaacttcccagtggagttagacacagggttgaatgaactgagtagtcaggctccagccagcgggtaatacacctcatccatccagctgtttccccattctcctctctcctgaaatcctttcagcagcctccatcctatatggcgtacttagataccactgagagctaactgcagctgctagttaggatgaaagtatcacttgccatgcttagtgtttactggcgttcgtcgcttaaatctcactacagtcatgaagacagtgctatgcatttttctctttctgaagacctttctcaataaggggtaatccccagacccaacagataccattttggaaatgtctggagacattggctgtcacaactaggtagaaattatgggtataagaagcatcctataattcacaggaaaaaagttccacaacaagggattactgtctcaaaatatcagtgtcactggtgagaagcttggagatggatttctttctttctttctttctttctttctttctttcttcctttctttctctctttttttactctgaagcttgaaggggttaaataacttgctcaaagctacttgataataatgtcccaacttgtacctttgagccacatttcaggcaagttgttaaatgactgcagcaatagattgatcatgcctggcaccaaagaagccacagttcccagtgagaaccttcgcataggagcacacctcggtgtaagtggctcttgtcaatcgtttacaggttacctactctggcatccttttcatcgcgcatatagaaccaggcccatggagagcagcgtttgactctaaacgttgacgtctctgtgcacggagacccacacactagaacatgtaatttctctgatttttaaaatgttattagcagatatatgacaaatatatataaaggcagtttatgtgagtaaatagtcgcactgcctctaatactccatgaaatacaaaacagagttacagtatataatgaacaagttatacataatgaatccattgaatagttaaatgatagaaaaggactttgatatctcctccagaacttttctcctatgcagcctattcctgggctactgtaactttaggcagggaaagggatgttccaagaaccacaattattgagactggccttactttcactgctagccttgggtatggctgtcttttacatttgagagaagagccaccttctgccctcaatccagcagagccatctatgtccaagactcactgcttggaagacttttcctgtgttctgtactgaaacactcagtctcaaaacacagctaaccacccacataataaaccaaatgcaatgtgagttgccaagttaaatctctccgattttcctaagcgtcacaatacaaaaggcatcaggtattgagaaagcatatcagaggggagaaaggtaacagacagaaagcagtagtaagctgacagcctctggcttttgttttaaacccttttatcctgttttatcttcatagagcaatagatttcccaagtgtccagaaacaaagatctcagcctagccatcacagattttcattgttgcctctttctgcacactgtgaccctgagcacacactgttactggtacaggtgggcaggcactgcttacaatgttggcaagtgctgaagaagcggctgcgccattgtcatttctgagtataaataaaaatacccaaaaggttatacaagcacaatttaaattgagattaaacttttcccaccttcttatcataaactcagcctgacccaaacatgtgactacctatgtgctaattttagccaatgaaaaataaaatcaaaaatttcaattcctttgacttgccataacatttatctaatcattagccatcataggcagaagccatattttacaatacaattaaagggcatttcaaatattatatccatctccaaataaaactatcactatcaatatacacaaagataaaaagttgaagagtgcccagtgttggtccacctagtaaaataaccaaacacacatacacatacaagagaagactactatctatatgtgcttgtatgtatatgtgtgtgtatatacatgtatacatacacacacacatagagagagggggggtgcttgtgcatgtatagggaattatggaagacttgtggcatctagattggttcacagtggttatctctataaagagctctggtgcaagggatggggaaatagtctcttttcgccatggaaatggataacatcctttctcatttgaatcaatcatgcactgagaaaagaaggtgatagtaaaaattatacatacattagatcctctgtatccaaaagcctgctcactcagagctgtgctagtcagggctacatttatctctagacagagattctgttcttgtatgccagattatccaaccaatcctaagtcatctgcccaaagaaatgaggctaaatataaagtcatgctttgtaaactgccacagttacagcaaaatcccacaggctccagaggaaactctctaaccaaagaacctttccctgcaggggaactcatgactatttacagcttctgaaagaaaatggcttcccctggctttctaacccccaccatagccactccttgctctctcctgctccaggcaagacaaatgcacatctaaaatctatgcacatcctcagaacttggttgagatcaaatgtgtatgttctgcagtgaacaagctgtcccatgtgttaagcacactggggaaatcaggcagaaacctcatggtttttctacacatccattccatccatccatccattcatgcatccttctattcatgcatccatccattcatgcatgcatccatccatctatccatccagtccccatgggaatgtatgagccaattctaagcactgggaaggcagatgcctttggttaatatggaagaacatacctcaaagagaagtggttggagggagcagtagaatctgtaggtgagcctgactgatcccctgacaagagaaaagtttgctttctgtcttcatgtttgttgtctcaaacattaaatggcaaatatggtggagtcaccatgcacactgatgcggaggcaaatgttgttcttgcttagtgtgctcagaatcacaagacatcctaaaagaaagggcatctatgcacacttccaaagcactcatcctgcaataaaactgtgccatcttcaccataatgcttgacattcttctacagcggccttttccagaagaggacacatccagtcattccacgcaaagccttcttatgtgggcagattcttccacctgtggagatggccctgacctgtggagcttcctgagactataagacctcaccccatcacagtacccaccatcttaatgaatctcactatcccctctggagcatgttgggtttctgactcaagccaggcacatttatttgacactttgacttgatgagtgcctaggttcacacccatatatgactatttttttgaccattttgggaagcttagatctttgtctgctgtgttccatcagtctttcaatagttacagcccttgttatcttgctatcacatacactgtcgtgaaaaaggtgggggagggggcagacgaaaatacccatgccaaaaggatatacattcctcaatatatgtcgcatattgaccttaacttcagggcaaatgatctttagagtcctgaaagctggaagcttgattctttttccttaattaccacacataaggcagggaaaggaagcctttccaaagtgttctgtaagaaagaactctcttaagccatctcttaatcccaacccccttttcagtttttaattccttaaaaggaatccttcacacaaaggtcctctgaggactcttcatctgaagccaaacctggcttctgactttgcgagtaacgatgtgaaagcaagaaaccgctggtggaaactcacgtgtacagaccttcctttgctgcttcgacaggggttggcccatgtgccacaagcaaaggttcagtctcaagttttaaattggcacagacttgttatctttaattttgttaattattctaaggtcattccaaacagccatgtctggaatcacatcacttcagagaaggcctagaaggaaggtgttcccatcgctgaggctgccactggtgtgcagagctgtctgtgggcacctgtagcactgagtggtttcctcatggaccattagcgccagcctagaggaggcattccacgggcctgcatcaccttctactctacccgctttgcatccacagatcatggagtcagtgtcccatcacccatctctccacatcaaaagtaggacatcactaaaactttgatgccatgccaggtttttattgagccccagaactctagagttttcagattcgcaaactaacttttacagcctgtaaaactttctctctgcaaacttttggttgtgcttctagtacatttgaacccagtgagagtccatggactcctggaatcaagaggctacaaagcatgagctgctacatccaatccattaccgtaacactaggcagatttcacccaaacctctctgggcgcaggtgagaatcctgtcttcacagatcaccagggaaaagactatactgccaacctaggtagcccagtccatcaccagctcctttcaacactgacatgatctttgtactccataggaatgaatgtttcataccaggctgctatgagctttagaaccccaaatttgaatatttggtaccaaacgtcacaaagcagcttgattgttagcacattattcagccactattgaaaaatggcatttcaaaccaaatattgacacccacaccttgggctggatccaccttcatttcctaataagttcctgggtagcaatctccttaggatcccaggacatcctgcatctgatcattgataaatggagagtccattttcttggtccttaaaatcacagctatcattccctttccatattgtgtgccagcaggacagagcctgccatgagaggtaagcactgtgcctctggggagtactcctctccctccccccacctctgtctctcacacacatgcacacacacaaacacagacacagacatgctcacacgtgcataaacacacacacacatgcacacagcttttggtttctggtttgctgctttgttgtttggaaaggaaagctttaaagacatcctctccctgggtttctcattgtgcaatgcagagcagggacctctatagtctctacaaggtccaattacattgttggcacttgaagatccacagggccttctccagctcaaagcaaaatatgcacctccctttctttaaacgatttcccttggcaaaggggaaagtcaaagagactggactagtcatggaaaccctgacccaggaactaatgtgagcttcagacaagacacagccccagagaagcagtgcacacggtcattgtctgagatcgagggcctgaaattgacaccatatgtacccaaggagcgattgctccaaggggtggggagagaaaagccatatgtcagaacattgtggcaacacctaattcatcctgaggttataaataaatatgatgctccttttttttaaaaaagcaaaggttgaaaaatctttaactagattgcttctgtgaccatccttcaggcagaagtggactttattagggagataacaggaataaagagaaacacgtaacaacttttatggtatattttacatgattttttttttgcagtaaataaagtggttatagggctccaaggaaaagagcccagatgttagagagttgtgtgaaatttaggggaaacaagctgtaaaaaacacagccataaaataggctgtcagtgccacacatctggacaatacagctgtatgttcctagtgcctgtcgtcacccaaagaaaactcaataaccttatttcaccccaattagtccacataccaacaggatcaacattaagcagccagggatgggggcggggggggggggtgcagtgcagcatttatatggtggccctgtgtcaagcagttttatctttcacctgaatttggtcaccaagaaaaaagggactgccaacatagtcattttcactattataaaactcgattcaattctaacatcctaataagtcaaagactgacagtttggactgccagctactccaaacaacatcagactctctatagcacgaaagctacctgtcatgaagcagactgtgtccactaagtacagtcctgggagtctgacaccactgtacaaagtgttcaccaccttgctgaagacggagctggtaatgaaatgacccagccttgatggtcctggacacatttcccatctacgagtttgtctggtaacagcctgtctttccattaagacaaatatcacaaagcatcaagcatcctgtcatcctcttatcactgagagacctgatcaaagattatacagtgttgtctttcctaataactgtttctttctaggtgttcctggcagcaaagataatcatggagagtggagagaaactaaccttaccattgatagggaaactcttgaagtgtcaacttctccatattaaatccaaggaccagcagagacgagaaaatgaaaagaaggtaccatatggaacatgggttccccagagctcagaagctagtgggtgggacagttaaagatccccccccacacacacacacacttcctaagcctctatagtgtgtgttgtggcaagcctgaaagtctcctctactccttagggaagcagctgctcactcatgggtgtattggatgagttgttataatacatattatgtccccttgtttgtgaaaatggcaatgtccagaacatgtaatcaaggtggttttatggtagaatctttaatattgtaacaagaatggggcccatatcacaagtaaatatcaaaacaaggggaaaagaattgccaaattgggatatatttaaattgtctgtgatatagactaggagtgtttattagcctgtcaagcaccctgccctttcagagcaaagtgacagcttcagcaacaaccagtcactcctgctgccagatcctctctctgatctttttcttcccacatagggaaactttttatttactctgcctatagaaatcagtgtgcttttaaaaatttacatttgcttctgaaaaaaaaatactttaaacatgcagaatgatgcccaattcagagccatttgttatgatcactactaggaatgagaaaggctttcctccattttcaaattatgctgaaatatttttgtgacagcagatgcttctgtacgcagtgtgatgtgtgtccacatgcataagtgatagattagaaggtgagttctttgtgaccttgagtaggaaggacaaaaaaaaaaaaaaacaactaatggaaatagaaaaggtaaatatattcccattatgccttccttatctttgcaaaacccttagatctaggtatcctatttgactgagttatttatgacaatgacaatgacggcgacggtgatggtggtggtggtggtgatgatgatgatgatgatggtggcggtggtgatgatgatggtgatggcatcatcactttgtgcttgcaaaagctctatgctttcctagaaagaaccccatatagcttcttactgggctggcacattttgtacccaagaaaattctattcaaagaaatggttcatgttatggttttccacctgccagtgttctttccaccatgaatcataaatctgtacactaagaaacactcagagaagctaaaagttagcaaaagaaaatttagacaatttaaaagtatagccatatcctcttgtgtgtttaaatgccaatgtcatgggagaacttgaattgtgtaagtgaactgtgaggtttgtgaaacgcctacagatgaacagcacactaaagagtgtcacaggcctgtttgctgcccactagaagtcagtaattgtttactacaataatttcagattttagtaagcaatcttcaaataaaaaatggaatattctagacactcagaaatttttaaatatgtgaactgacaaaatatccttacattgttcttctgctcagcatttctctgaactgtgaactatattaatatggttaggagattctgaagctatagaaagaaccttgatttgcttgttaaaactttgggtgtctaacgagccatggcttgaagttaatttattgaagaaaaagcagaagacgcagtaagagaactctgagcaattaagaaccaatttaatttaatatcctcattaccagtgctttccagagcaccagcctcttgtgtctgagctgaaaccatctgagcaggtgctaaataaatggatgaaaactgattggaatggattactccccagaaagtcgtccttgtacatgagaggtgaaaggaacggtttgcagggtgaggggtgcacatctcggcagtgccacctgagaggttagtcggaacaaatgacgttactgctcgtcagccaaaagtctggcagacagcaaagtaagcaggggcagcgagtcgtctgcaatagctaatgcaggtgtattaccagtgggggaagagggtcttcttccttggacgaacctagaaaaggctctacgttggttgcacagggagcaaatcgtaagttttttcaaccttgccattaaatttacagagatactcactttcatgagctagttctagtatatcgcttgcatctgtccaaccccaagaatgttttatatcttctgtgtttaatttttggaaatgaactttgcaaagaatgaatgctttagcgaaaaattatagcagtaattatagaaactgttacggcagagatgggggcgcagagaagtgataggattgggcattttttgtcttttggtccccatggaacagatgtaaatgcgtcaccatatatttggttctatttccacgtcttttttttttctttaaaaaacaaacagtaaattatagtttaaagtgccagatagaataaagatactttagtcctggctaagttgaagaatgtgctgcagctgaacacaggctgttgcttttgatttctgctttgaaaggaaacttgctagataattaatatcgtgaaaactataagggaaaggcgctctgaaggaaccaaggtaaaactttagcatgtggacttgtaggatacaaatgacaacttctaattgtaaatatgcttgacctgtttgaaaacactcatctgtttagaaatacctcggtaatgacttccagatatataaatatagatataggtagaaacagattagaaatgtgttctggtgtataaacatttctaacacctcagaacttctgaatgatgatcctgcataataatagcaaattaggctgctcacaatgtcataaaatttgaatggggatgtttgttgagaaataaaaacatctctaacatttcagaagtcctgaatattattatcctatattataatagcaaattaggctgtttgctatgtcataaaatttgaatgggaatgtctgctcagaaacgcatctcccctccaccgttaactcaaggatcactctgcagctttagtcctgcattaacatctgcagttaattcatcagcctggcaaacatccacaataacaaatatccttggacacagtgtcctgggtgcagggattcccatcacattcattctggttttaaaatacgtctcttggtttttattctggaacattttgatttggctattgtgtgattttttcttttcagtcactcttgcttcttataaacttttgtattatgtattaattataagtacttgcttgtgaattatctcagtgtgattaagaaactaaaagaaaagtggtgtttaaaagagttgggaaatggctatggctacattacaaaaaatcattgacctttaatattactaaccgatgtaaatggagtcttcctataattcagaactgaaatcagaatatttgaaaaggctttccccaaaatatccaaatatgttttaattgtgcctttcatgaattaaatctgctcacattttctcagactttcatagcaaacacttttatatgaagggctggttctttttgtctgtagattgtgtaccaagtatacacatacacaagaatggagaaaaggcagacataaagaactatgggcagacaatatctagcaccttcttcattaaaaaaaaaaaagacaaataaaacagcctaattttgctaacatggaataatgaggccccatacaagcggcagccttctcccaaggagaaatgaagagagagtaagaagaaccactcccacagacatccccgagcttcttccagtcaaaccccgagaagctggaaatcggccagagaaatgccattttgtgcgtgtgttttattttaaaggaaaggccatagggacagaccaggaaattactggctggttagttttgattcagttgtggttaaattcttcagaaactattttaagaagtcaaacagaggaagggcagggaccctgtgtggagggctcctgggtggttctaggaaaggaataacttgcctcactaactggctggaattctttgaggcaggattatcaaaatgaagatccaactgacaaatggaagatctaaggaaccccaaaccccagcaattctgcagaaataaatgatgccccagctggcctctctgaaaaacaggacactgctgtgctggctgttttgattgttattaatgaaaacttttcatgcactactagaaatttttgattaaagagggacaatagactagcatttttagatagcaattaataatagctactattagtgactgtttgactctatatctttagacatgttatattatttagaagttaaacaatttaatatcattagtacaatgaaccactcctaatttgcagatggtgggactgtgggaggtgggaacttaagccttcttgaagaaggctctcaacagtcaagagtccaaccccaaccatcaggttgcatgtgtgctgttaaccactgtgaacatctcacctgtctgtctcagtaattctgagatggcctctggctctcatgcagtaaaacgctgtctggtcctgtttccctgggactcagagtcttgctggataatctgtccacagacatctctggtcccatttccccaggactcagagtcttgctgcataatctgtccacagacatctgccctgactgatcttttctcatacaactttgtgaggttcagtgtggggacagttgtcttgaaaaggaagaaaactcagcaaagataaacagcactgggttaactaatcactgatacaaagaacaaccatgtcttaatttctagttctttcttcccaagaaatcaccgagtctcttaaagaatgagactttctgagcttattttgtataccctaatgccttctccctgccccttccggtggttaatgaggatatcattagcttgcatgatgccaaagtttctctgagctatgtatgatcctgcaggaagcacatatcagacctgtccccttctcaggccaccacacacacagacatccctatgttttgatccacggaactaggaacagtgcaaattacctcccatgcctaatactactgtgtggtcttataaagagtgtatcatttgatcagttgaaacaagtacatccctaagcatgaatgtgtatattcatgtaaacttatgtgtatgtgtgctgctggtgcctatagaggccagaagaggaaactgctcccctagagctggaattatatacaagctcttgggatcttcccaatgtgagtgatagaaaccaaactcaggtcctctgaaagaacaactagtgctcttcaccaccgtgccatccctccagcctctctaaacatatttttcttcactctaacacagcagttctcaacctgtgggtctctacccccttgggggtcaaatgaccctttcacatgggtcgtctaggaccatcagaaaacataggtatttacattacaattcatttcagtagcaaaattacagttatgaagtagcaatgaaaataattttatggttggaggtcaccataacatgagcaattgtgataaagggtcacagtgataggaggactgagaaccagtgttctaacagctctctggagaagcaagtttttaattcaacttcatgcattttcagatctctggaggtactggaaatgacctggggcagtaagcagcaagagggagagtggagaggaataaaaaagaaaatatagaaataatgtataaagcataacagataacaataaactaccatcatcctgttattatcaataacagtagtattcagaatgcttccttttctacttcttgatatatatcataaatactataatatattatatataacaatcatactatatgatatatggaatatacatcatatatattcattcctttatagaattataatcatggtaaaatatcttaatagtttttagctaaaatgtaccataatttggctattatgacaacacccatatctattgttattacttgttctgtgagtttctactgcttatgctaattttcttatttattattctgttgatggacatgtatgtgctttctacatttggggtagtaaataatatactatgcagtacacagtggtctatattttgaataatgtttttattgtagattttaaagctggattaattggttccccaaatattcccataatcttgtgttttcaaattgaactgttacaattagacatagttctccatgtaaaaaaaaaaatcaccctgatcaacttaacttagagatcactgtgtgtgtcatgcgccatcttggatatttgacagtatgatggctaattaacagtgacgggatttcataaaagtaaaacatatctatttcatacatgtatattctgagtttagaccacttcacacactcgagggcatgtgcgtgtatgcatgccctctctcattacttcctttgtactgctcaatcctttttcaagaggataaatatggttaatattgttttacctcatacacagtctctgaggctctcaccatctctggaaccaaacaagtgacttgcttactagaaggagtgagatgatcaaagagctctagcacaggactcagaaaagacctagtttcttgtaaaacacataatggagtaagttagttacaacttccacaagtctgctttctcctccatctccttaattttactgcaaagttcttacagcaggccacacatacacatcagtgatacatggtatatagagaattggctataaaataaatgaaatatagctattcacttccatgtacttggcttttaccactgaaccccacccccactactgagaaaggaagaagggatgtcaattaggtttgagtgttaacatcaaaatgtcatttagaaataaaatattatctgaaaatttttgaattaccaaataactaagttgctttgttacagaacagaaatttcccccatctttagaaagatgatgtaactgaagattctatatagattcccttaacagtcaagtgagtatgtggagtgctgtaactatcttcaggtattgctttgcatgagaccgccacatctgctaagaagcttaaatggttcagaagtccctgggcctacccaaagccttcctacagtaggaagcatccagatgtcttgtattcatattctgttttagagagagtgcattccatgataaacatgaacctccacccacgtgctagggatatatgttccccaacacagctggggagaaactttttccctgtctgcattttgtcttgaattgacaagagactccctcaaatattttaagctataagaagaaggccatggaaaaggaacatgaagtcatagtgtctcaaagcaagaaagagtatatgagcaaagcttagtttgtgatttagggttcattcatgctgaatgtttgtctagtctgccttgttcagctttcacctgtaacggtgagtttagctaatccactttggctcctggcaagttgcacctgtgcactcccgcacccacccaggagctatctagatgtgtaaatggaacacacacacacacacacacacacacacacacacacacacacacaccagttaatttcaaaatgccttggctacctcaaaggctgggcactctttaaccttcccctgctgtcacaggccagtggccacccacctggattctcacatggctggttggctttctctcctgcagcttctataccacattcttctcccctgagaaatagtgattctctgtctcctttttcccagtttctagcccatgcaaatctaaaggtcccaccctatctcccttcaccccaactattggccgctggcatctttattgatcaatcaaaaaccagttaaggacaagaaccttcagcatttggacatggagcttccagattaaaccaaagcatttgaaccaatccctaacatttacccctaaatgctgcaataacctgtatgttagataggggtacataaaacaagagaaaaatgaaaggtaaggtttgagcttcctgtgactagagcttagtagaaacagaagaacctatttcaaaccaaggaacaactgtaggatcctagctaccagtctttgttcagaatgagggagcttgaggatgataaggccctggatcagcctcagtatggatagtggggggaagggacagtctaaacatgggagagtagataagtcaactttgaggtcagctatgagaagatagaagagatcaaggaacctgttcagaaatccaccaacaaacatctctgccagacctggagcccattagaagcaggtgcttgtgtctgcacctgctcactgccatacagtttcttggcactggagaatccttgctgtgcccggaggttctttcataaccatctttcttgaagttctaacaaccattattgttaaatgcaccatgaaagatggtaaactgtctagaaagaaggccaaagatagtcatataaaaatgaggcagagaagtggaagcaaaagcaactatcttcactcatctttctaggtgctgaaattttggaaacttgtgaacttcttcatctttcaacttttcagtgatgataactctttctccagtacagtggtgttaaaaggatgaccggggtgaaacaaaaacatgtttgtgaaagtgaaggggggggtgatggtgatcattcacttatactaaaagaaacggatctaaggattttgttcccagcttcctggtgtggccttgttaagaggagaaaaagacagtcgtgagtaggaagcacgggtagaacatccaggaatgactgctgggtccctgggaagactgagcagagggagtgcagacactgataaaaggagagaggcagaaggacagaaggagaggacactgggaaagaagcagaagctgaggccaactggagcctcagaacagtaagaggagcttagagccgcaagtcagagcagcacagcctcttccacagctcggtgtcctcagacaaactgtgtgtcttaatagaaattacccgtcttgctttgtgagatcagattaaaagcatggtgtctgaaatcacatttcatactgcattactagatactggcaccagaatttgtcactgattttgaacttggggttatgaccagcctatttctaagacccctcaccccaagaaaaaaaaatcataggaaacaatgctcaggatctcctgaactggtaaactccatggaggaaaatcattcaagaattttcccccactgtgctctgcaaatgcatgtagaatgctgagctatttgaatgagtgcataagttgataaaaaattatcccttagaattacttaacctaaaatcactttcttatctcagttcaaagaaattaccccaagaccttgttctaaatttcagccataaaggcttctgaaaggcctttgatggaaaagttgtgactttactgtggcaagggtaatgcctacgaaggacattcacaggggtttcacgttgatatatgggccatcacccaaagctgagttttcagaggccctgatgagccccaataaagcccacaggctcactggaatcagggccatggctgtgctccaaggactctttgcagagaacatgggtgacacaactctctgacctggcattcctgttcaataacttggttattaaattgttgctcgctcccaccaagctttataaagtgaagctaattctgtacccattgtccctgcaaggacttaacaaggtgcaatgtttgctataaaacatgatctctgtaaatggaaatatcctaaatattgatgacagccatgattaaaatagctcattgctaacttatggctgagaatattattttcggtattacagggcagacttattggcttaaagttttctccttgtagaaaaatgaagttatagagagaacttcaaatataaaccagaaaggtgtgtttaatgttgtacagccttggtgcctgatgcagcagcccagccacaggtacctgctcagtcttccagactctcccattggtctgtcactgccctggacacttgaacaggctctaacatccttggcttctctgggtctttttttcctttgtcattgattcttttcttatttctctcattgtgaacagaggttttcataatgacttcttgattatctaatggtcatttcctccatcccacatcagccatttactcctatggttttctaccctggcccatcaccactgaagtgttaaggtctcccattctctaaacttggatgtcccctatcctcccctcttaaaatgacctaataggaacttcccccatccccaaagtgtcttcaactccattgtaagtgctggtcaacagcagccaccagtctctatgtattgtcatttctgctgtttgtcttctactccatggtccacacctgtcgtcttgtgctttagaaagtcttatttcctctcttttctctatttccatcatgatcttgaactcagcaaccccaccctaccctcttcatgtttgtatctgagcaaacaaagacaactcaagacgttcagaggacccaacatgcttgttctgttttcatcacacaaaaggctaaatcctaccacattcccccagtacacttgctctttgactgtctgagatgaccctgacgttatctaactttattggaaattccacattttttacctgctgatcttgcctgctgacttcatcacacacacacacacacacacacacacacacacacacacacacacacacacattctcttgaaaactaggaacattctcacttctcttgaaaactaggaacattctctcaggaccacccagagctcttcctttcttccatctacacccaacaactgagcctctctctgtggctcatcctgaactagtgaatcttgtctggaatttttcagatgtccccctataccttcaacatctccctggattattctatcaaccagcaaacatggaaactcctgctgtctacacagaggtacattcttaactcatctttatgcccactgccatctgctcacctgacaaatgatgcacggtccaagttcccttcacaacgaaacttgacaaggtagctggcccacacaaatgctgtccttggtgtcatgtgtctccatgtctgccacctctacagcttgccatagctgtctttgcttagtgttagccacaactacaggtgcatctttttaaactttttagtccacttgctgtgtttccttacatcctacgttttttgaccttttattcacttctccctcttattgactggcttcttctcctataccaaatggatagatttgggactacccatgatccaaagcccaattctcacatttcttagaagctcttacccaattctcaagtcaatttatgtctttccatgaacttatctgagctctgttacttgcttttggaattggtaactgcagttaacatgtctgaacacagaatgtggcccttagaagcacaaggtatgggcctgtgtaccagaggctttctatggagatctctggccaggccaggtgggagggttcaagtgaaggagaaagggtactagctatgctgtgctgagccagtgaaaagctagctagccagtgaggggaacttctggtggcctttcgggagaacagttcgcttacctggcagtggtgttacagcttttatgacagaagctctcagacaaggggataattctcacacaccttcattccttctggataggatctttgtatacagttttggagtgggttggggtctgacagtatgtacttcctattggcttggtctgagaggttagggatgcctaacctctaaatgtggaagggcttgggggtttgccactatgtgactgatggccacaaatctcttggggaaagggagggggcaggctgcagaggactgcagttatgtgacaggggcctggtgcctggaacagacaaagctcctaccatcccttcagggtctccaaggcttatagacttagcccaaccttaccaggcttcttctcatggccctccaatataatgtgatcacttacagtagtcttcccatgttaactgaaaactgcttctcaccagtgttctctatctcagtgaggactagcaccaaaccacccaggggctcaagctccgatccatggtgctccctttgatatgcctccttcgtcactattgtggttagactctcacagtttcaacatccagaatggatctgaaatccatctacgtttctccactctgccaacaccttcatgtgagtcactgttaggtcttctctggactatttctacatctccttattaaaatttcagttttttataaactcccctaccctaaaactctcaagtcttcctgctgatttttcaatgaggtaagaatttattggccccatctctaaagtcctgggttacatgtccattcctagttgtctacctttgccttgggccactctgcccttgtcttggtgccctatgtcttccggctctctgaacacacagtttctttatgcccacatgcctttacatggcaccttttccctgtttcttacggtcattctgactaatttttcagggttttgctcaaaggccccctccttagagaaggcatttcatccacagacttataagcacagtctcttcagttatgtttctgtctctgcagtcattaaaattttagttctgtttttgtctgtctgtctacttatctttcttttcccttagattcaactctaagaggtagtgcctagccctgttgtaggcaccaattcatatctaatgcagggagaaatgctggaccctctcacatccctgtgccaggcctgtgtcacatccaaaactgttcatgacactcccagcctctgttgctctgtccctctactcacagaaaggtccactgagcaagcaaatgattatatggatgctcacattaaaaaaaaaaactcacagattttcacaacttctgtgcttgctgtcattttctcattaagcttagttcttcttcttcttcttcttcttcttcttcttcttcttcttcttcttcttcttcttcttcttcttcatcatcatcagggagagaataaggaagacatatgtctggtgggcttgactttgactctgtgctcttttccttttaactgcccttgtctgtctggcatgggactggtttcttgaattttcacttccatcccaagggcttatgctgtggctgctgccgtggctgctgtggcagaagtggctgctgtggcacaggtggctgctgtggcagaggtggctgctgcagctgcctttattgaggttactgcttctgtctcttctatcctgatgtcttaccacttgcatatgcttcagccacattgaatttctcttcattttctgcaacctctggtgtactttcccagtttttacccagtgctatcagcaggagccttcacagatatttttttcccgtggctgttaaggagcaagagtggcagcgttgccagccttggaaccctcacactagccagggaatcttttggcaccagtgatgccgtccgtgaaaaccaaagtttgcctgagtcagtccttcagagcccttagcagcaaaaaaaaaaaaaaaatcatatagagcacaaacttctctcccctctatcatgcaacctgttggctgagtaccaatgctccctatcttcgacttacccaggctataatatcttagaggttttcaaattagtttccatgaccttaggaaatggatgtcaaagcccaaaataattatacaatattttaattatttttatcttcaagtatttttacatatgaaaaaaataagatgcacatatttatctatattctgtagagtcatcatcttaggccctgtactccactatcatttcaatgagaataaacacttccaatttatcaacacagacgcagttttctcaacataatccattttctacagtgtgtatttctcattcttcatgatttcactgtttctcaccatattcaaggtcctacagtgtgtgtttctcattttgcacgttattcagtgtttctcgccaaattccaggtcctaccatgttagtttctcattttcctcgtttatcatttttctcgccataagccaggtcctacagtgtgcattgctcatttttcatgtttttcagtgtttcacgccatattccaggtgctacagtgtttgtgtctcattttccacgtttttcagttttcctaggaaatagtgtgcaaagtttgggggaagttgtgaaggggcagggtaaatattggatcttcccacagacatgtgaactaagcacgccctagagcaatttgtgaagaatacaagcaaatgtcaccctctatggatcccctcttcctagatatcagccactcactagtcagggctatatgcttttaagcagaattgtaataatgagaattttttttttagtgttaagatctcagaagaccttttaacctttaaaaatggccaacatgaaaaacataggtagattttagaaagcctattcattgtcttccggtttgttttgttttgcttgattgttttcacacaaagacatgtgcactccaaaattgggctaagagaccaacccaagctcctgacaccacaaggtattctgactcttcctccgattctgccctaccccacatcagcacaagcacatagctcaaattattgagagactcctttagatgaccctcttctagaaggctactcttttaaacaacctcctggtacctccccactacactcctgcctgcccctcagtgcccctgtcttactagtatttctattgctgcaacaaaataccatgaccaaaaatgaagttaaagaggaaagggttgattcagctcaaatagttccacagcactgctcatcattagaggacatcaggacaggaactcaaatagggcaggattctggaggcaagatgatgcaaataataatggaaatgcagtaaaatcaagagttgatttgatgacgtgaattagaggatgaagttgcctaagtttggggaaacctttgcttactcacaagatgacttggagggtaagaatgtgctttctcgtttcagatggtagaagaaagaacaaaatcagaaaaagacaaaggaaaagggaagtctccaaaggagaagaaagttgccagtgccaagcctgggaagggaaagagcaaggaccagcctgaggccactgtaacagtgaggaagaccacacagttaaaacggaggggagaagatgacgaggccaaatcctatatcggtcagtgtgtagctccacatggtgtcttccacctcttgctttatagaccagaatagggctttaagagtcacctctataattacacactatcattcttagcctttctattttaaagccacatatgacctatgctctgtggcactcagattgaaaaaaatatttctgtttgcaatccatgtatggttttagctttttttttctttctaattactgtcttgatgagaatgtaatggaaagtcaggtgtaattataggcaaactgaaagtgatctagcaagatggctcctgaggaaagttgctcactctcaggcctcaccatcacccccaggcttcttatggtggaagaagagaaccagctgccacaagttgtcccctgacctcctcaggcgcattatggcacacacaggcatgactgtacagcacacacacgtgcaagcacatgccacacacacacacacacacacacacacacacacacacacatacacacacacacagataagttagtggaataaaagttgatacatgtgagaaatctaattatttgagaggatatgcagaacacagcttcttttttatctatacagcatattttatttttatttatttacattcccaatgcagttccccttccctggcccccacaaagttcctcccccccttccccttctcctctgagagagtgggccctctcctagctatacccctatcctgacacatcaagtctctgcaatattaggctcatcctctcccactgcagtcagacaaggcagccctatgtattggggcaggggagggggggcctcggtccaggccatccatgtaagaacgcatcttcttgactcaaacttttcacacaatctttctgtcttcaacagatcaaatagaacttcgttctgtcataattggctgacccaaaactgagtcattttcaggagttactcatgatttgagtgattcacagctggttttctctgagtccagacagaactacctgttactatctttattttatttgtttgttatttgtaatcaatagacttgattcttgatttctttcaacacttttgatctttactgtgtttaaattaagtaagagaaactggcttttttatttttttgcatcttttatcagttgatccctctcatgtatctctacttaaagataataaaccccaaaacaatgattctgtgctctccatagtcaataccaatgctgaccattttcaaggttggggagaattaattacatgaacttaaaatgtgagcatctgttgtatggcatgtacattggctttactgagctgcactgtgctgcactgtacagtgtaaagttcttgtgtatcatgcatggtcagcatgaaagcaggacgatttctgtcacacccagaacatcgtagtctaagagagtctcatgttttaatattcataaggaacattaccaggaaaatgagaatagagaactactttatactatgtatgtcttcagaaggaatacagtatagctgcctcaccattgatgcatggtgttctcaccaccctgacatgaattcgttcagtgctatgctacagagcacatccacagtatttccttatcctgtaaacacctttacttataaagtaccagaaatctggagctacttgtaactcgggagttaagccagatgttgctcaactgagattagaatcaaaggaaactagttacaggttaaactctgacaaaagctcaggcaccatgttccatggccgcagaccccatgtgtgttggccctcctaatatgtctatgtctcatttgcaaacatgatttaatattttataaaatggccacagtctctttactggaaaagcaataatgaaaaacagtcaacaggcctgtgtcccagccaactgcctgggtcttggcaagccagagagattacgaacataagcataattgagtttcaccactggtttgcctggggacaacctgttctacctaacaatgagagctgaccttctttctggtatttccaacagatgatgagccagacgatggtgcccaatattacattattgttgtgggcttcaacaatcctcagctattggccattatgactgagcttggcattcctataaccagtgtgattaaaatatcttcagagaactatgaacctctacagacacacctggcagcagtcaggcagcaacaggaagctgtccttcagccagaaggtacacacttggcctcggaactcacagagtccatcagtattgcccctacccctcaatacaaaggcaatctgctgtctgaaacatggttataaagcatacactatattaaatcctttcaagactgatttgctatatattctgcttatatcagccaagagccataaatttggcaaattaaaatcatactcggtgctcgtatccctgtgtagtcacagaaaacataactccaggtcagaagacttagttactcaactgttctcagtcttttagctgaaagcaagggtggtaacacaactttatttttcaggaacttttgacctgcaatgtttagccaaagcctgggctagataaatatttgttaatactcttttctttcaaatgacatagtcactgaacagctctgacaagatcatacagttgtgtgtgtgtgtttgtgtgtgtgtgtgtgtgtgtgtgtgtgtgtgtgtgtgtgtgtgtgtgtgtgtgtatgtgtattcatggagaacagaagatggtgttggaccatttggagctggagttgcaagtggctgtacataacctgacatgggtgccaggaaccaaactcaggtcttctggaagaatagcaagtactctcaactgctgagttacctgttcagtttggttttacatgttagttattctacatatattactaactcattgtaataaaagtcagagaaaacattgtatcttccagacttaaattgggaaattaaagagatgaagccacagccatattattgtccagtcattttgagtattggggtctttatctcaaggaatgtgctaatttacttctatgggacaaaaaccagaaagctactgtgaccttcaggtaacagcactgagaatcaatgccaatctgtgattccaggggccaagttactcttactatatgtgttgatattgatgttatcataaatattttcaccatgccttttaacttacagtcaaatatcaatttccttctatttttccccaaagttagaaatcactacctttgataatattaataattaccatttattgggtgcataatttgggatctaagctcaatgctaagagttttaaatatattgatttttatagttttcccaacattccaaggaagtatattttatcgaaaaaaatactttcatatatcttgtggttttccactcccctagttccttaatcatctttcctacctctacagctactcaaattattggttttttactctcttaaaaggaaaacaaaaaaacccacaaaatacacagagaaactctacaaaaacagaaatcaaaatcttgcttatatagtaagagacaaataaaacaaacaaacaaaatgccccccagaatgtaaaatgaaacaaagtctgaaaaatattattgaaatagctttgtgctgaccaactactcctgagtatggggtctgttatgcaatgttgttaatatacccagtaagactcacttggagaaaacggattttccttttaccagttggtatcaactacagataacttcttggttaggggtggggccctgtgtctactttcctatttcaatgcaggaaccttacctggcttaaatctatgcaggtactgtgcatgctgccgcagtctctgtgatttcatagtgcatcagtctcctgtgggagaggcactgttttcttggagttaccaattacctctgtgtagatcctggaaccttgagaaaagatcattgatgaaaatatctcattcagtaccaagtaatctaaagtgtcttactctcttcacattgtctagttgtgagtctctgcgtcagtttccacctactgtatggcattaatccatgtgtatagcagaatgtcattaggaatacttttactgctgtgttcccttagcagaataatagtgttaggttttcccctaggcccatggcacatatgtagccttgggttcttgaccagcttagcaatgtcgtgtataggttccatttcatggaaatctcaaagcagtttactttgcattcccctagtgcataagaatgttgaacatttctttcagtgtttctcagccatttgtgttttccttttaagaactttctgcttagttctgtatagaccatttttaaatgaagttatttggttttttattcagagtttgtttttttgttattgtgtttgttttatcattctttatgtgttttagataccaaccctctatcaaatatataattagcaaagaattcgtttcattctgtaggttgtcattttttaaatgatggatcctttccacacagaagtttttcagtttcaggaagccacgtattaactgttggtaatacttgtgctattgatgtctttttcataaaggcctttcctgtgctaatgagtttaagactaatcccactttctcttctgtaagacttggtatgtctgcccttatattgatgtccttgatccatttggagccggggtttctggttttctggttttgttttgttttgttttgttttgttttgtttttgtagtattatgagtgtggatcaacttgcattcttctacatatagccattcagtttgactagtatcacttgttgaagatgctctctctttctccactgtgtatttctggcttctctatcaaaaatcagatttccataggcatgaaaacttatgcctatggctttgattagattccattaatcagcatgtctacttttatggcaatactttgtgttttggttattgcaactctctaatacaactaaaaatctgaatggtaatgcttctggcattattgttgttgttatgttgttatgctattctgttgttgttgttgttatgttgttattcaggataattttagctaccctggaaatttttggttccatatgaagttgagaattgctttctcaatatcttgaaagaattgtgttagaattttgatggggattgagttgaatctgcagattgttttgatggggtggccattttaagttcattaatcctaccaatccttaagcataaaagatcttattaatcttctgatatccttttccatttctttcttcttaaagacttattatacaagtctttccctgagttggttagagttacccaaagatgatatttttgctattttagaggttattatttcctgatttctttttcagaccatttgttatttgaacataggaaggctattgattttttttacattaattttgtatcttgatacttatctgaagatttttatcagcattagaactttccttattggattgataggaatgcttatgtataaaattatgtcatctgcaaataaagatacttcgacttctttctttcctgtttttatacccttgatctccttcagttgtcttgttactctatccaggatttcaagtactgcataggatgtgtatgaaaagaatggacatccttgtcttatttgtgatttagtgaaaatgttttgagtttctctccactcacattggcattggcaatgagcttattgtaaattgcttttattatgttaagatatgtcatttgtatgtctttaggttgtttatcatgaaatggtgttggattttgacaaaggtcttttctatatctagttagatgatcatgtggggttttttcgtttagtctgtttatgtcatggactacatttattaattcatgcatgttaaaccatacctatatctctaagtcgaagtcatggttcataatattttatttttcttttattggatattttctttatttacatttgaaatgttatcccctttccaggtctcacctctggaaccccttatcccaccctccctccccctgcctatatgagggtactccctcaaccacccacccattcctgccttcccaccctggcattcccctacactggggcattgaacaccctcaagctgaagggctgctcctcccacttatgtccagtaaggctcttctcttccacatatgcagctgggtctctccatgtataatttttggttgttggtccagttcccagaagccccgggggtgtttgaccagttgacactgttgctctaatccatgggtctgcaaaccccctcagatccttcagtcccttctccaactcctccatcagggaccccacattcagtccaatggttggctacgctcatcacctttgtatttgtcaggctctggcagagtctctcatgagatagttatatcaggctcctgccagcaagcacttcttagcatacacagtagagtctgggtttggtgactatatatgggatggatccccaggtgtggtagtttctggatggcctttccttcagtctctgcaccacactttatttccatattttctcctgtgagtattttgttccccttctaagaagcactgaagcatccacattttgatcttccttctttttgagtgtcatatggtctgtgaattgtatcttaggtattccaaacttttgacttaatatcagtgagtgtatatcctgtgtgtccttttgtgactgggttatgtcactcaagatgatattttcaagttccattcgtttgcctgtgatttcatgaattaattgttttaatggctgagtagtgctccattgtgtaaatgtatcacattttctgtatccattcctctgttgaaggacatctgggttctttccagctccaggctattataaataaggctgagatgaacatagtggagcatgtgtccttattacatgtcagagcatcttctgggtatatactggggagtggtattagtgggtcctcaggtagtactatgtccaattttctgaggaacagctagactgatttccaaagtggttgtatcagcttataatcccaccagcaatggagaagtgtttctctttctccacgacctcgccagcatctactgtcacctgagtttttgatcttagccattctgactggtgtgaggtggaatctcagggttgttttgatttgcatttccctgatgactaaagatgttgaacatttctttaggtgcttcatggccactcaatcctcagttgagaattctctatttagctctgtccccatttttcaatagggttatttggttctctggagtctaacttcttgagttctttgtatatattggatattagccctctatcggatatagggttggtaaagatcttttgccaatctgttggctgccatgttgtcctattgacagtgtcctttgcctttcagaagctttgcaattttatgaggtagcattgaagggattcttcatcttagcacataagtgctaagcattaagacattggtattctattcaggaaaatttcccctgtgcccatgtatttgaaactttttcccactttctcttttattggactcagtgtatctgaaggccatttatccatgtggacttaagataggagatagaaatggatcaatttacattcttctacatgttgaccaacagctgaaccagctccatttgtggaaaatgctgtcttttttccactggacggttttaccacctttgtcaaagatcaagtgaccataggtgtgtggattcatttctgtgtcttcaattctattccattaatctaccaccctgtcactataccaataccatgcagttttttatcatgattgttctatactacaacttgaggtcagggatggtgattccaccagaagttcttttactgttgagaattgtttttgttatcctggcttttttgttattccaaatgaatttcagaattgttctttctaactctatgaagaattgagttggaaatttgatggagattgcattgaatctttagattgcttttggcaagagggccatttttactatattaatcctgacaatgaatgagcatgggagatctttctatcttctgagatcttcttcaatttctttcttcagacttgaagttcttgacatatagatctttcacttgtttgggaagagtcaaaacaagatattttatattgtttatgactattgtgaaggatgtcatttccataatttctttctcagcctggttatcctttgagtataggaaggctactgatttgtttgacttaattttatatctagccactttgcagaagttgtttatcagcattaggagttctctggtagaatttttggggtcacttaagcatactaccaaaccatctgcaaatagtgatattttgacatcttcctttctaatttgtatccccttaatctccttttgttgtctaattgctctggctaggactttgagtactatattgaataggtagggagtgagtgggcagccttgtctagtccctgattttagtgggattgcttcaagtttctctctatttagcttgatgttggctactggtttgctgtatattgcttttactatgtttaggtatgggcattgaattcctgatctttccaaggctttcattgtgaaggggtgttgaattttgtcaaatggtttctcaacatttaataagatgatcctatggttttcttctttgagtttgtttatgtagtagggttacgctgatggatttctgtatattgaaccatcccaggatccctgggatgaagcctacttgatcatgatggaagatatttttgatgtgttcttggattcagtttgtgagaattttatgaatattttttgcatcgatattcataagggaaattggtcttcctttgttgggcctttgagtagtttaggtatcagagtaattgtggcttcatagaacaaattgggtagagtacattctgtttctattttgtgaaatagtttgaggagtattggtattaggttttctttgaaggtctgatagaactctgcactaaacctgtctggtcctgggctttttttggtgggagactattaatgactgtttctatttcttcaggggttatgggactgtttagatcattattctgatcctgtttttgtttttttatttttattctttgtatagtccttttgtttctacttggttgatttcagccctgagttggattatttcctccagtctattcttcttgggtggatttgcttctttttattctagagctttcaggtttactgttaagctactagtatatgctctctgtattttttttttttttttggatgcacttagagctatgagtttgcctcttagcactgctttcattgtgtcccataagtttaggtatgttgtgccttcattttcattaaattctaaagagtctttcatttctttctttatttcttcctcaaccaaattatcattgagtaggatgttgttcagcttccacgtgtatgtgggctttccgttgtttttgttattgaagaacagccttcgtccatggtgatctgatagaataaaagggattatttcagtatattttgtatctgttaaggcttgttttgtgactgattatatggtcaattttggagaaggaaccatgaggttctgagaagaaggtatattcttttgtgtcaggatgaaatgttttatatctatctgttaaatccatttggtccataacttctgttagttttactgtgtctctgtttagtttctgtttccgttatctgtccattgatgagagtggagtgttgaagtctcccactattattgtgtgtggttttagcaatgtgtgctttgagctttagtaaagtttcctttatgaatgtgggtgtccttgcattaggagcatagcagttcagaactgagacttcttcttggtagatttttcctttgttgagtatgaagtgtccttccttatcttttttggtaagttttggttgaaagtcaaatttaactgatattagaatgggtactccagcttatatcttaggatcattagtttggaaaattattttccagcaattactctaaagcaatgtctgaggtgtgtttcttgtatgcagcaaaatgctaggttctttttatttatccagtctgctagtgtatgtcattttattgggcaattgcatatattgatgttaagaaatattaagaaataatgtttgttaaaggtggaattatgtatgtgttgctttcttcttttgggttgtttttaagattactgctttttctagggtgtagttttcctccctatgatggagttttccatttatcatcctttgtagggatattatataaattaggttgtgtcatggaattctccatctatggtaattgagagttttctgggtatagtagcctgggaatgctatttgtgtcctcctagggtctataagacatctgcccaggatcttccttccttccttccttccttccttccttccttccttccttccttccttccttccttcctnnnnnnnnnnnnnnnnnnnnnnnnnnnnnnnnnnnnnnnnnnnnnnnnnnnnnnnnnnnnnnnnnnnnnnnnnntttctttctttctttctttcttttctttctcttcttatttaaaaaaattttattagatattttcttcatttacaatacaaatgctatcctgaaagtcccttatacccaccaccggcctactctcatacacacacactcctgcttcctggccctggcattcccctgtattggggcatataagctatgcaagaccaagggcctcttctcccagtgatggccgatgaggccatcttctgctacataggcagctagagacaagagttcagggggtactggttagttcatattgctgttcctcctataggattacagacccctgcagctcattgggcactttctccagctcctccattgggggtcctgtgttccatcaaatagatgaccgtgagcatccacttctgtatttgccaggcactggcatagcctcacaagagacagctatatcagagtcatgtcagcaaaatcttgctggcatatgcaatagtgtctgtgtttggtggtggtttattgtatggatccccggatggggcaatgtctgcatggtcctttcttccgtctcagctccaaactttgtccctgtagctccttacatgggtattttgttccccattctaaggagggatgaagtatccacactttggtgttccttcttcttgagttttatgtgttttgcagatccatccatttgcctaggaatttcagaaaatcattgtttttaatagctgagtagtactccattgtgtaaatgtaccacaattttgtatccattcctctgttgagagacatctgggttctttccaactccaggctattataaataaggctgctatgaatataatggagcatgtgttcttattaccagttggaacatcttctggatatacgccaaggagaggaattgctggatcctctggtagtactatgtccaattttctgaggaactgccaaactgatttccagagtggttgtagtacaagcttgcaatcccaccagcaatggaggagtgttcctctttctccacatcctcaccagcatctgctgtcacctgaattttttatcttaaccattctcactggtgtgaggtggaatctcagggttcttttgatctgcatttccctgatgattaaggatgtcgaacaatttttcatgtgcttcttagccattcattattcctcagttgagacttctttgtttagctctgtgccccattcttaaatggggttatttgattttctggagtccagcttcttgagttctttgtatatagtggatattattcccctatcagatttaggattggtaaaaatccttccccaaactgttgatggcctttttgtcttattgacagtgtcctttgctttacagaggctttgcaattttatgaggtcccatttgtctattctagatcttacagaacaagtcattggtgttctattcaggaatttttcacctgtgcccatatcttcgaggctttcccccactttctcctctataagttttagtgtgtctggttttatgtggagttccttgatccacatagacttgagcttaatacaaggagataagaatggatcaattcgcattcttctacatgataactgccagttaagccagcaccatttgttgaaaatgctgcccttttccactggatggttttagcttttttgtcaaagatcaagtgacgataggtttgtgggttcatttctgggtcttcaattctgttccattgatctacctgtctatcactgtaccagtaccatgcagtttttgtcacaattgctctgcagtacagtttgaggtcaggcatggtgattcccctagaggttcctttattgttgagaatagtttttgctatcctaggtcttttgttattccagatgaattttcaaatgaccctttctaactttgtgaagaattgagttggaattttgatggggattgcattgaatctgtagattgcttttggcaggatagccatttttgccatattaatcctgccaagccatgagcatggcagatctttccatattctgagatcttcttcaatttctttcttcagagacttgaagttcttatcatacagatctttcactcccttagttagagtcacaccaaggtattttatatttgtgactattgtgaatggtgttgtttccctaatttctttctcagcctgttatcctttgtatagagaaaggtcactgatttgtttaggttaattttatatccagctactgcactgaaggtgtttatcagatttaggagttctctggaggaatttttagggtcacttatatacactatcatatcatctgcaaatagtgatattttgacttcttcctttccaatttgtatccccttgatctccttttgttgtctaattgctctggctaggacttcaagtactgtattaaataggtagggagaaagtgggcagtcttgtctagtccctgattttagtgggattgcttcaattttctctccatttaatttgatattggctgctcacttgctgtatattgcttttattatgtttaggtatgagccttgaattcctgaattttccaagacttttattatgaaggggtgttggattttatcaaatgtttcttagcatctaatgagatgatcatgcgatttttgtctttgagtttgtttatatagtggattatgttgatggattactgtatattaaaccatccctgcattcctaggatgaagcttacttgatcatgatggatgattattttgatgtgttcttggattcggtttgtgaggattttattgagtatttttgaatctatgttcataagggaagttggtaagaagttctctttctttgttggatctttgtgtggtttaggtatcagagtagttgtggcttcatagaatgaatttggtagagtaccttctgcttctattttgtgaaatagtttgtgaagaactggaattagatcttctttgaaggtctgatagaactctgcactaaacccatctggtactgggcttttttggttgggacactattaatgactgcttctatttctttagggtatataggactatttagatcattaacctgatcttgatttaactttggtacctggtatctgtctagaaaattgcccatttcatccaggttttccagttttgttgagtatagccttttgtagtagatctgatgatgttttagatttcctcatattctgttgttatgtctcccttttcatttctgattttgttaattagaatactgtccctgtgccctctagttagtctggctaagggtttatctatcttgttgattttctcaaagaaccagctcctggtttgcttgatgctttgaaaagttctttttatttccacttggttgatttcagtcctgagtttaattatttcctgccctctactcctcttggatgaatttgtttccttttcttctagagctttcaggtgtgctgttaagctattagtgtatgctcagtatagtttctttttggcagcactcagagctatcagtttttctcttaggaccgcttccattgtgtcccataagtttgggtaagttgtggcttcattttcattaaactctaaaaagtctttaatctctttctttatttcttccttgaccaagctatcattgagtagaatgttcttcagcttccacaagaaagttggctttctactatttatgttgttactgaagatcagtcttagtccttggtgatctgataggatgcatgcgataatttcaatatttttgtatctgttgtagcctgttttgtgaccaattatttggtcagttttggagaaggtaccatgaggtgctgagaagaatgtatatccttttgctttaggataaaatgttctgtagacatctgttaaaaccattcgtttcataacttctgttgttttcaatgtgtctctgttaatttctgtttccaggatctgtccaatgatgaaagtgggaagttgaagtctccaactattattgtgtgaggtatagtgtatactttgagctttactaaagtgtccttaatgaatgtggctgcccttgcatttagagcatagatattaagaattgagagttcatcttggaagattttaactttgatgagtgtgaagtgcccctccttgtcttttttgatatctttgggttgaaagtcgattttattagatattagaatggctactccagcttatattttttgatatctttgtgttggaagtggattttattcaatattagaatagctactccaacttgttccttcagatcatttgcttagaaaattgttttccagtcttttactctgaggttgtgtctgtctttgtccctgtggtgggtttcctgtaagcagcaaaatgttgggtcctatttgtgtagccagtctgttagtctatatgtttttattgtggaattgagtccatcgatattaagagatattaaggaaaagttattattgcttcctgttatttttgttgtttgagttggagttctgttcttgtggctgtcttcttttaggtttgttgaaggattactttcttgctttttctagggcataatttccatcctttgttgaagttttccctttattatcctttaaagggctggatttgtggaaagatattgtgtgaatttggctttgtcatggaataccttggtttttccatctatggtaattgagagtttttctgggtatagtagccttggctggcatttgtgttctcttagtgtctgtataacatctgtccaggatcttctggctttcatattctctggtgagtagtctggtgtaattctaataggtctgcctgtatatgttacttgacctttttctcctactgcttttaatattctgtctttatttagtgcattttttgttctgattattatgtgtccgaaggaagttcttttctggtccagtctatttggagtcctgtaggcttttgtatgttcatgggcatctctttttttttaggttagagaagttttcttctataatttttttgaagatatttactggtcctttaagttgaaaatcttcattctcaagccgggcatggtggcacacacctttaatcccagcacccgggaagcagaggcagggagatttctgagtttgaggccagtctggtctacaaagtgagttccaggacagccagggctatacagagaaaccctgtctcgaaaaacaaataaacaaacaaagaataaaagaaaagaaagaaagagagagagaagagaggaaggaaggaaggaaggaaggaaggaaggaaggaaggaaggaaggaaggaaggagaaagagagagagaaagaaagaaagaaagaaagaaaagaaaagaaaagaaagaaagaaagaaagaaagaaagaaagaaagaaagaaagaaagaaagaaagaaaaagaaaagagagaaaggaaagaaagtcttcattctcatctatacctattaatcttagatttggtcttttcattgtgtcctggatttcctggatgttttgaactaggatctttttggattttgcattttctttgattgttgtgtccatgttttttatggaatcttctgcacctgagattctttctgccatctcttgtattctgttgctgatgctcccatctattgttcctgatttctttcctaggatttctatctccagagttgtctccctttggattttctttattgtttctacttccatttttagatcttggatggcttggttcaattccattatctgtttgattgtgttttcctataattctttaaaggatttttgtgtttcctctttaaggacttctacctgtttaacagtgttttcctgtaattctttaaggactgctacctatttatcaatgttctcctgtatttctttaagtgagttattaatgcctttcttaaaatcctctaccaccatcatgagatatgattttagatccgaatcttgcttttcctgggttatccaggactctgtagtggatgtactgggttctgatgatgcccagtggtcttggtttctgttaataagattcttacatttgcctttcaccatctggaaatctctggtgttcgatgttctacctgtctctggctgaggcttgttcctcttgtgattctgttagcttatgtcagcactcctgggagtccaaatctcacctgagtcccagtgctcagagcactctctgcaggcaagctctcctcttgtagggaaggtgcacagaagtctggagctcaaatccacctcctgagtcctggggtcagagcccttcctggaggctcactctcctctgacaaggaaggtacccaggggcctgcgtctcagctctgcctccctgctgaggatgaaggtccaagggtctctgtccaagaagctttgttgcttctgctgcccacatgctcaccagtgatcccaagctcctgggtatgctagggtgcctacagcatggagagtcctctggggaccttgtcaccctctgctgggttcaccccaaagatggcgtggggctgaccccgaccagaacaaatcccagcctctggtcaggtgaggttcctttgtcactgttcctactggcacaagaccctccgggattctttggaactgatgttgcgttccactcaccagtgatcccgaggtcctgggtgtgctagggggcctgcagcatggagcgtcctctgaataccttgggaacctctgccaggtttgcactgaatatcctgcccaggattctctatctttcatagtctctagtgagaagtctggtgtaatgctgataggtctttttttgtgtatgtgttttcctataattctttaccttttttttttgttactttacctttttcccttactgcttttaatattctttgttttgtgtttctttttttcttttttctattacatgatgggaggaatttctttcctggtccaatctatttggaattctgtaggcttcttctatgtttatgggaatctctttctgtgttagagaagttttcttctataattttgttgaagatatttactggccctttaagttgggaatctgtgctctcttctatacctattatccttgctcattgtgtcctggatttcctggatgttttgggttaggagattttagcatttttcgttttttttttactattgtgtcaatatcttctatggtatcttttatgcctgaaattctctcttctatcttttgtattctattggtgatgcttgcatcaatgactcctgatccctttcctaggttctctatctccaggtttgtctttcctttgtgatttcttttttgttttatttctatttttagatcctagatggttttgttcaattccttcacctgtttggttgttttcctgtaattctttaaggaatttttgtgtttcctctttaagggcttctacctgtttacctgtattctcctgtatttctttaagggagttatttatgtccttcttaaagtcctctaccatcatcatgagatgtgattttaaattagagtcttgtttttctgctgtgatgtggtatcccaggctcactgggagaactgggttctgatgatgccaaatagctttggtttctgttgcttatattcttacccttgcctctcaccatctggatatctctggtgttagctggtcttgctgactctgactgtggcttgtcccttcagaaatccttatcagtactcttgggagatgagttctctccaggaggaatttgggtatggagagctatggcacagggtaagctcctgggtgcagacagaaacctgaaggatcctgtcactggctgttccttggttcctgtgtcctgatgactttggactggtccctcttgggccaggaatttgagcagacatggtgttcttacctgtgctcacaggtatgtcagcactccttggagacctactctatcctggtggtgtttgggtttggaactctgtggcacatgatcagctttgttaacagactggttcataatctttttaaagtatttgttcttaggttcagtttggaaatattttattgagaattttttacacctatgttaataaaggatattggccgataatttttttcttttgacaagtatttatgtggttttggtatcagggaaatagtggccttatttaaaaacaataagaaatgttccttgtgtttttattttgtaaaataattttaaaggtgatggtattaaatcttttttgaagatattgtagaattctgtggtgaatctataggctctgggattttttggttggaggactataaactactgctgattctacttctttgaggggttatgggtgtggaggttgtatatatcatgaaatccatttgtttcttttagtttttccagtttggtaaagtgcagattttaaatagaaaatctgtattaactgaccagtgactatactgaggtttttggatcccagtgcagccccaagactttctcagggtgagcttttaagcacggaaaaccatatcttaggatgacatacttccgttaacaagaacagttagccagagcagaactacagaagccagaaaataaggttagttagagactttctcagaacatggactttgatgaattaagtctttactttagttttggcaggtagtgctgtctagttttatggccagaatggtatatccatcatggagtcagttgtactaaagaaaagttacccactgttactgtgtgagagtcaatgtgtgattttagctatagtcttttcttttataaacttggatccccttgtgtttgatgcataaatgtttagaattgcaatatcctcttggtatatttttttactttgataagtgtgtagtatctttctctacctcttgtgattagttgtggcctgaagtatattttgtcaaatattaaaatggcaacaccttcttgtttcttgagtctatttgcttagaatacattttcccatccttttatcccaatgtgatgtctattcttgctggcagtgtatttcttgaatgcacaagaagaatagattcaattttacaatttagtctgctagtctgtgtctttttattgagaaattaagaccattaataatgagagctaccaatgagcagcattttaaatttgttatcgtgctcctcccctttcatttactgttgtgagtattccttgtatcttcttatgtgtggttaacttcttcgtactgaagttgtttttctagtgccttctgtagcactgagttagtagacataagttgcttaaatttggtttcattgtaaaatgtttgatagctttgctgggtatagaagtctgggtgtatcagagttgatcattgcccctccaggcccttctggccttcagagtctctactgagaaatcctatgttattctaatgaatctaccacttacatgttacctggtgtttttcccttgtagctttctttgctttatatagttagtgttttgatcggtcatggggaatttcttttctggtcctgtcttttggtgtctcatatgctgcttagatccttatccttatccttatccttatccttatccttatccttagagtgaggaaatttcattcataattttgttaaaaacattttctgtaccttttaactaggtttttattcttcttctatccctattatccatagatttgttcttttcatagtatcccaggtttcttggatgttttgtagctgggttcctttagatctaacactttctttgactgaggatccatgtcttctaccttttcatctgagattccctctccctcttgtattctgctaatgaggcttacttatgtggttttggtgcaatgttctaaatttttcatttccagtcttatttcagttttttttcagtcactcttcctttgttaaatccactttcaagcctgtaattgttttcattatttcattcaactgtttgtttatattttcacagacttcattaagggatttatttatatcctctttaagatctttgaacatattcctaatagctattttcaagttcttgtcttgctgcatttcttaggacctccttaagtagggttgttggattcttgtggaagcacgttgtcttgtctattcatgtttgtgtttcttcactggggtaggcatctggaattatgatatttttggtgctgatatctcatcattgttggttgggtgctccattctttggttgctgttatcctctctagattcagatagctttaggaggtccacaatagaccataatgttgcagtccatgagtagtaaaaatgaatggggataccataaatgcaggcccaaagcagaattcaggaaaagatctgggagacctgggactgcattaagagacagagtccacataaaaagaaaatgggatgggaggagaggctcctacaaagaggctacattaggacaaagaacaaacctggagagacatagatgaaattgtaggaggaccccccaagtctacaccaagaggtggaatacccaggaaatggagaatgggatgctgaagacagacttctacagtactgagaatgaatctgaaaagatcataatggaggtcaaggagaataaatgtcacctactaagtcctagccctatgtggcctctctctctctctctctctctctctctctctctctctctctctctctctctctcaccaaaaagagaaaaggactttagaactagaggtaactattaagtcagaaatttgagattcaaacccagacccgtgactattatctcacaagatattcattaaataatgcattactgaagctggtgagaaaatgctgcataattaccagatataatctttatataagacagtgtactaatacacacacacacacacacacacacacacacattctgcatgataaaaacatactgtctcatatgtctaatcccagaacttgacaggccaagataggaggattgcccattggtttgaggtcattttcaggctccataataagtttcaggcaaacctacataggttacagtaaaactctgtctcaaaaaatatatataacaaactaatactaggccttttacaataggatgatatgtcataatattagacccaaatatttaaatgtagacataaaaaacataaatattttaggtaaactttcaagtctaactttatggaattctactatcagttgacagtcagcaggggcaactattcagaaaaaatgtccctgctgtaacatgaccaaaagctaactagagcataaattactcttaggcctgtgagaagtgtatctaggtcagttttttaatatacaaacttggtaaagcaaatacaaacttggtgaaggcatgatctgaggaaattcttgttctatgtaatatcaggacaatggtagcttagcattctttgctcccaaaagaccttatcacaatctttctgggcctaaactgtgagatggactctgatgaacttatatagtaacccattttgattttacagttgtgtcttcccacttcaaaaagttctcaaagttacgtttctgtatttgcactttgctaatactttacagacatcttatcatacatatgactcactacatcaagacaaagtggggagaaatacaatactttgattttatattaaaacattttgctattattagatatagaagctgaaaaattgaagagaaaaaattccatcaaggaacttgaggttttctggaagtacttggaaccaatcctgaataatgagaaacttgaaatacatctctttgatgttgctcgtctccagtacatggtcaaggcaacatattttccttctgattggtcagacaatgaacagatggtgagtctattggtcagcatgagtgagtggtccattcacagtcactcattccacagctgttcagtaaccactggtaacaatgacttttgttgggctctctcctctttcagacaatgatggtgacaaaggccactcttgtatcatagcctgattctgtagcttttagtctatagattaatgataataaaatatagcagatgcttattctttcattaaattacaattggctctggttcatgtattggtaatgatctaagtaataattaaaatgtatgatggtggcaaattttacgttttattgtattacatgttaatcccttccaaagtacacatttcagcatcaagagagctgaactgacagcaaagcctgtggggagactccaacctctgagggttcttctgaaaggatttgaacaaagctggatggagagagtatacttataaagagattacttattgctaaagagagagggtaggagaggataagggaggggagagggaggggaggggagaatatggaggggaaaagactgaggaaaaaaagaaaagaaaaaatgaaaggggaaagaagaaaaaggaataaagaaaatgggaaggtaacaaagggaagggggagggaagggaatggggaagaaaaggaannnnnnnnnnnnnnnnnnnnnnnnnnnnnnnnnnnnnnnnnnnnnnnnnnnnnnnnnnnnnnnnnnnnnnnnnnnnnnnnnnnnnnnnnnnnnnnnnnnnnnnnnnnnnnnnnnnnnnnnnnnnnnnnnnnnnnnnnnnnnnnnnnnnnnnnnnnnnnnnnnnnnnnnnnnnnnnnnnnnnnnnnnnnnnnnnnnnnnnnnnnnnnnnnnnnnnnnnnnnnnnnnnnnnnnnnnnnnnnnnnnnnnnnnnnnnnnnnnnnnnnnnnnnnnnnnnnnnnnnnnnnnnnnnnnnnnnnnnnnnnnnnnnnnnnnnnnnnnnnnnnnnnnnnnnnnnnnnnnnnnnnnnnnnnnnnnnnnnnnnnnnnnnnnnnnnnnnnnnnnnnnnnnnnnnnnnnnnnnnnnnnnnnnnnnnnnnnnnnnnnnnnnnnnnnnnnnnnnnnnnnnnnnnnnnnnnnnnnnnnnnnnnnnnnnnnnnnnnnnnnnnnnnnnnnnnnnnnnnnnnnnnnnnnnnnnnnnnnnnnnnnnnnnnnnnnnnnnnnnnnnnnnnnnnnnnnnnnnnnnnnnnnnnnnnnnnnnnnnnnnnnnnnnnnnggaagaaggggaagaaggggaagaaggggaagaaggggaagaaggggaagaaggggaagaaggggaagaaggggaagaaggggaagaaggggaagaaggggaagaaggggaagggaaaggaaaaggggaagaaggaaggagaaggaaggggaagggagagaaaaagaaaaagctaagaggacagaaggcactgattctgagccaaaggacaatcatgcagtgaagcactgatcctattaccttgtgatggatggcacttggcaaaagaagtgaaagtattaagaggagatggagactacgacagaaaaccagaccaaatgcagagttgttgagcccattcgcaatggagacatctacaaagcactactatacctgaggattaggaaaccttatggaagagagggagaaaagattgtaggaacctaaggatcaggtgtttactgtgaaattgtgactcttagtaataacagaagctgcactcatgacgtcttactgactgcccaatatgagcttaacaaagacaataccagtgaacataccaaactagacaaggaaaagaccaagatgcatcaaccctacataacaagctatggacaaccgagtaatgctggaattgggtcaagtggtcttcccccaggaaaagcaccgtggctacccaatgccaaattatcagccctgaaaatgttctcacacatcctcctttgccttgctccttcctcctttctacacctgatgcagaaaaggatctgccttttactggtgctttttaaattgagtcagcacagttccctattccagagatactattctttccaatgatggaggactaggaatgttccttattactatgtcgaggtgatatcttttcccttggaattctaaatttttggtaggtgtttagttttttgtttgtttgtttgtttttctttttttgttattccttcttgtgcacatatctacacatttacaacttagaggaacattttttcctatcatgtaaatcaagatatggctacataaatatccttccaagagttggggtttggtgagatttctcagtctctgaagtccttcttgcacaagcataaggacctaagtttggatctctaatacctacataaaaattggaaatgtcagtacacacttgtaatcctggcatcagagggtcagtggtaggcagaaccctaaaggtcactaggcagccagacaaaccactcagtgagctccagtgagagaccccatctcaatgtcaatttgtggtctcctcacatgcacatacacacacacatgagagaaagagggaggggagggagaaagagagagtgagaatttgttcaggatggcttaggaaatcctatgataagattcctgaagcataattcctaggaagatgctaacacatcctcaacacaaagtaccttttgtcattcacaaatgagtgtgctctcccatgggtcttctttaacctcaaggaccatgctggtagaagctgagtggttctatgtcccaaatagaggacacaccattgcttcatcaggctgtaaaggtaagcaccatgctatgatcacagcttcagaagactcagcatcacccacagcatcctgcttactacacctatgtccacagctccctgttcattaggaaacatagatcattccatttcacttagttattttgttaataaaaatgtagtgtggcttatacagtgatttttctgtttgctaagagtttgggagagttttgggtaactttattttattttattttattttatttatttttgtaaagtcacagaattggcattattgcttgggtctacaggactcaccatgttaaagacagaagcatgccaacttgactgctatgtgtttgtgagcatcagagagacaggaaaaggttttgtagagatctctttaaaccaggatcaacttgaaatgaaggtctgagtggtttctgggtggcccagggtgagaacatggcagatcttttctttttcccactttctccaacatggctgctgaggacactctaacacacaagtgctattccagagctctgtatgctgcatactgcataaggggatctctgcatcacttctaatcatggtgtgaagccatgctagcttgatgccaagttcattccactttaaagaaaggggcagtggccatatttaatattttaccaaatatacagtagaaactttacatgataatttaacttcagaaaaactattttatgttgaaaaagtattacttgaaatgctagttacagtagaacattcctaaatttagaactagattgatgttcagtttgtctacctgaacttgaaaacattcagctcttcctgtcctggccgccattggagagcagcagccatggctctgcactgccccatggccatgggcctcgacaagggccacaaggtgatgaagaacatcagcaagccaaaacacagctcgccccacaggctcctcaccaagcacaccaagttcgtgcaggacatgatccgggaggtgtgtgacttcatgtcctatgattggtgcactgtggtattgcccaaagtgtccaatgacaagtgtgcattcaagttcatcaagaagagggtgggcatgcacatccacaccaagagaaagtgggaggagctgagcattgtgatcgcagccatgaggaaggcggtgcccaagaaagattgatgaaccctcccccaataaagatcgttcctacaaaagaaaggaagaaagaaagaaagaaagaaagaaagaaagaaagaaagaaagaaaggaaggaagagaaaggaagaaagagagaaagaaagagaaaggagaagagaagagaagagaagagaagagaagagaagagaagagaagagaagagaagagaagagaagagaagagaaaaaagaaaaaaaagaaaagaaaagaaacgaggaggggagaggagagaaggggaggggagaggagggtaagggagagggggaagggcagaggagagaagagaggagaggaaaaaggagaggagagaggggaggacaaaggaaaggaaaagggaaagaaaggaggaaaggaaaagggggaaaaaggaaaggaagggaaggggaaaaggaaaagggaaaaggggaaannnnnnnnnnnnnnnnnnnngaagcattcggctcttccaggggaaccacaggctgtgttgcccagctggtccctctaattttatattggtccatttgtaagtaattgttgagcatcttcttcatgcaaaggctatggttggtacccaactgaaataatcatagcttagacctgtctctttgagtgaaaaatccattattgaagataatggggaaagtctacccaaaaatgacttagcaataaaactgatttccagaaaaaaggaccacttaggtttaacattgaatggcaaagtctattttaaactcagaattgcttactgagattaaaagtaatgaggctacttcatgtagaagcaggctaggtccatggtggtgcattcttacctatgagttgttaataacttcatatctgctttagaagccaccagtatgtgagactttctttctccctgcatggaggaaagcatttgcatcctctggctcaaacaagcagcctgtatgtctgccgaactaaggtaatgaaagctttacatcaagtcactatcagtcaaagtaagctaagaactcatgtaagacatctgaaacacctcaagatatactctggctgctgaaataatttgccagcctttggcatatcatttgctgatgaattttaaaatgaattacatagattgtgctaatgaatcattgggcagaaacttcactgtatttcctttagcaataaaaatggaaactgtctttctgtgccaacatatggataggcacagaatacctgttggaatttaactcaaaactccctggtcctgatgtgagtgtgtgaagcccacagtcaggtgtgctatgatgaacagagccaagcatttccctggatgtctgccagcctatgagtcactggccccacagaggctctccattccaccttacctcctcaactcagatgtaggaggggcctgcttagtgcttctatgcctcctaactgacagacacagccatcccagaatttttctactccaggaaatgaaagcttaagtaataaccatagcagatctataactggcttgccagctcataaaaacagtagaagcagtaatttggattccttcaagctttcctgctaacagtaccacagtgaaaaccagctcaggaaaaggaaagaagggaggaaaaggagaaatcttgatcacagatacacgctccttcgtacttagacactacacaaatccaggtgagggaatccactgtgctcatccggttcttaaagaaatcatcaactgctcgattgcttctcctcaaccagaatcatctaacaggttttaggatttgaaacgccgagcacatgaaacatactgtagatgcaccaaaacattaaacattatggtactggacagcgtcagaacctctgtggccaacatgaagggcatgaagaatttatgtttggaaactccctcaccaacaccagaaattggtatttggggatctggagattcgatttcctgtaaaagagaaataggcttttctagaaagttacacatattctatctattctgatagcatgacagcaatgttgagttgattctcactggttctctcccttatagcttgcattgggcaccgagatctttgaaaacattgcctgtttgatgtacgatagcctggactggaagaggcaacatcatcactatttgcaaagcatgcagctcatcaatgtcccacaggtggtcagtgagaagaccgtgctagaggcaatcacaatcccagaggtaaggaagcatggactctcatacctatcatcatcttggggatggagtgagtgacacaatgatgtccatatttataaaacatatgaagaaaagactacaataaagtgtttgtgtactgctgcctgttgtgtagaggtgtaaggttagaaacaaggaaacatctcttagcaagaacagtaacagccatgtctttatgatgctccttataccagccacttttatgtcaacttgacacaacatagcgttatctgaaaggagagaacctcaactaagaaaatgcctccataaaatccagctgtgaggcattttcttaattagtgattgatgagggaaggcccagctgattgtgagtggtgccaaccctgggctggttggtggtcctgggttctataagatagcagactgagcaagtcttaatgagcaagatagtaagcaacactcctccatggcctctgcatcagctcctgcctccaggtttcttccctgattgaattcctgtcctggtccttcaatgatgaattaaaacgtggaaccatatgtcaaataaaccctctcctccacaactagctgttggtcatggtgttccatcacagcaatagaaaccctaactaagacacttcttacatgggaaagcacaaaaagacccacctgtcagcttggggtacagtggccagcatgtaaaacaaggggcatattgacaaaatactcctagcgtttgcagtgttagtgctcagcaagatgctagccacataacaggacaagactcctgccccacctgaaggggagtgtaatgtcagagcttcaacatggaatgagaagaatgaaatcagcagacataatcaaaatgataccagccctaattagagtttcagatgctgttacaaaacattgtgatcataagcagcttatggaagaagagttcgtttcatcttagagctctcaggtcacactctatcattggggtaaagcaaagcagaaattcaaggcaggaactgaagtaaaaaccatggaggacactgattactgattactggcccttggagcccagagcatcaggagtgaccccagacatcaagcattgatcttcttacattgataagatctggttttgctttgactcagttgtgactgtgccttggtttttccctttggggacaaagcatttaactggttttgacttcacagaaacccacagtggaaagacattgggcttctgaagagacaaaactttcaagttcttgaaatatttaaagattgtggaacttttaaaagtttgaatgtttggggttgtgatattgatactaatgtgaaatcttgaagtaaacaaaaagggaagtttatttcataatgttgtatttgtgtgtcaatcttaataaaataatggaggtcaaatgccatagctagatttttttttccctttgagccaatccagcactagctatggccatctcagaagagagaatttcaaatgagaaatgtctctcttaattggcctataggcaagtctccatgcattttcttgataaattattgatgttgaagggcccagcccactttgggcaatgccctttcctgggcaggtggtcctgatgtatataaaaaagcaaactgagcaagccagtaagctgtgtttctccatggcttctgctgcagttcctgccctgacttcactcagtgatgtagtgtgatctgtgactgtaagaagaaattaaccctttctccccaagttgttcttgatcatggtgctttaccacagcaacagagactatgaatgactcagacagcaactgagttagagaacagaaggactgagaaacatgaaccagggctagacagataggaatgctgagcatgaattgccaggtgggaaacctgttgggaaaggagtgtataataatattctgaagaagagaggacaagataacccaagatgtggaagctatcatgactcaaactaagaccagggggatattctgtgtcctttttgcttttttcacaccctcactttttaggatcctgtgatgtttgatgaaaacgcttcttttttattatttttctttcagcctccaccatcaactgctccagcccccactgggaagaagaaagcacagtatgaggagtcgcatgctccaccaacaggcatgtgggaaatcaaagcttaagtactcccctctcgccatcctgttcatactgtagtcagcaacccctcccccctacagtgtctacattgattggtacctcacagttctaacttatgcacagaatttcaggaagaactagagaacgcatcttaactgggcaatgtcactttctgcatttgacagtggcttttatcatcacaactgaagtagacatgcggtattacaatgacctgctgaatccaattccagaggaatttatttctgtgtccttgatactgcactgcatggtggaacaggtgagtagaggttgaggcttcctccctgctagcaaccttgaccaacatctctcttcacttccaaactttaggccgattttgtaattgtcctcagaacacttggaatgcagcccatttattcagtcagactatttcaaatataactaagatttgctttaataaccaacttcagtcctctctctctctctctctctctctctctctctctctctctctctctctctctctctctctctctctctcacacacacacacacaccaacacacacattgggctctagaatcattcatttaacattccccaaagcttgggtagaatatactcttaaaactgtccttatatggaggtgctgattaatttttgtcagcttggcacaaactagagtcacctgggaagagagacccagaattcagaatttgcctctatcatattggccttgggcatgtatgtagagcattttcttgattaatgatgatgtgagagagcccagcccactatgggaagtgtcatccctgagcagatagtcctgagatgaagaagaaagcaagctgagtgagccatggaagccatatgcttcaggtatccacattagttcctgcctgcaggtccctgtcatgagttcctgccataagttcctgcctaggcttccctccataaaggactggaacctgaaagccagaagaaccctctcactcctcaagtagcttttggtcagtgttttattacaacagaaaggaaaccaagatagtagggctaatttaatgaaagaagaaaagcacttggataggggctcagcttattaatggcctttaatctttaaatatttatttataaatttatgtttgtgtgaatgcctttatgcatggatgtatattatttatgtgaaggaaccagtggaggccagacaaggcaattatatcccttgggggtgaagttacaggtgcttgagagctgtctgatgtgtgatctgggagtttttggttagttttggttttggttttggttttatgtgtactgactcacttgattttctagacagttacactaatagctttctttactgcagaaggttttagtgagtccagtggttttatcatgtcaatgcataaaaaaaaaaaaaaaagcttgaatctctaaaacctttgagtcttgtagtcttgtgactttatttaccacagactcccgtttcattcaaatcaagtcaaaagcagtgactattctataattgcctgccaagtcccagttaaccagaaggatggctgatgagtccccccactttccccctcatctgacagactacctggagatatgtggagatgaataaaaatctgacagttacagggtaaggaaacaaagtattgaagtaataggatgccacccacaggactagaagtttaagctctgatattcagagatggagcagtttcaactgttcctttaggatgccaataaatccatgaaataattgaaaggtctgaaacagcaacagtagtcagtgttttgaaagactgagtgtcaccaaaggtaaagaaagtgggatttgatggggcacaagaacagtaaaacatctgagacaggatccttccggtcagccatctgcatctgcaagctgaggctgttccacagccccctgtgcccaggttcccccaggaaagacttattctcccaggagtgttttcactcccaggttcagaggtgaaatagccactttctctataataactgtctggagctgggcagcaaagagtacatggaacacaagaacggtgtagcagctgggacaggatccttacagtcaccacctgcacccagagcttgggttgttccagagccctctgtacacaagttctgccaggagagagctggtctcccaggagtgctgacacaggcttacagatccacaggaggaacaagttccagccagagacagcaagaacatctaacaccagagataaccagatgacaaatggcagactcaagaattttaccaacagaaggcaagactacttgccccatcagaacccagttctcccaccacagcaagtcctggattctccaacacaccagaaaagcaagatgtggatttaaaatcatatctcatgatactgatagaagattttaagaaggacataagtaatacaggagaacacaggaaaacaggtagaggcacctaaagaggaaaacacaacgaaacaggtgaaggaattgaacaaaatcatccaggacataataatggaaatagaaacaataaagaaatcacaaaggtaagacagccctggagacagaaaacctaggaaagagatcaggagtcatagatgcaagtatcaccaacagaatacaagagatagaataaagaatctcaggcataaaaagataccatagaagatattgacacaacagtcatagaaaatgaaaaatgaaaaaagctcctaacccaaaacatccaggaaattcaggacacaatgagaataccaaacctaaggataataggcattgaagagagcaaagattccaacttaaagggccagtaatatcttcaacaaaattatagaataaaacttccctagcctaaagaaaaagatgcccatggacatagaaaaagcctacaaaacacaaaatagatgggatcagaaaagaaattccttgacatataataatcaaaacaccaaatgcacaaaacaaagaaagaatgttaaaggcagtaagggaaaaaggtcaaataacatataaaggcagatgtattagaatacaccagacttctcaccagaaactatgaaagccagaagatcctggaaagatatcatacagaccctaagagaatacaaatgccagcccaggctactatacccaacaaaactctcaataaccgtagatgaagaaaccaagatattccatgacaaaaacaaatttacacaatatctctccaccaatccagcccttcaaagataataagtgaaaaactccaacacaaggagggaaatgacaccctagaaaaagcaagaaaataatgttcttttaacaaaccaaaaaaaaaaaaaaagataagcacaaaaaataattccatctctaacaacaaaaataacaggaatcaacagtctattttccttaacatctcttaatatcaatggattcaattccccaataaaaagacatagactaggagattggttacataaacataacacattttgctgcatacaggaaacccacctcactgacaaagacagacactacctcagagtaaaagactggaaaacaattttccaaacaaatgctctcaagaaactagctggagtagccattctaatatcaaagaaaatcaactttcaaccaaaagttttcaaaaaaatataaggaacgatacttcatacccatcaaaggaaaaatctaccaagaagaactctccgttgtgaatttctatgctcctaatgcaagggcacccacattcataaaagaaattttactaaaactcaaagcacacattatactgcacacaataatagtgggagacttcaacaaccctttttcatcactgaaacagaaactaaactgagacacagtgaaactaacagaagttatgagacaaatggatttaacagatatctatagaacattctatcctaaaacaaaagaatataccttcttctcagtacctcatggtaccttatccaaaactgaccatataatcagtcacaaaacaggcctcaacagatacaaaaatattgaaataaccccatgcatcctatcagatcaccatggactaaggctggtcttcaataacaacatacataatacaaatcccacatgcaagtggaagctgaagaacactctactcaatgatatcttggtcaaggaagaaagaaagaaagaaattaaagactttttagagtttaatgaaaatgaaggcacaacatacccaaacttacaggacacaatggaagcagtcctaaaaggaaaactcatagttctgagtgcctccaaaaagaaactgcagagagcacacactagcagcttgacatcgcatctgaaagctctagaacaaaaggaagcaaattcacccaagaggagtggactggaggaaacaatcaaactcagggctgaaatcaaccaagtggaaataaaaagaactatacaaagaatcaacgaaaccaggagctggttctttgaggaaaatcagcaaaataaacccttagccaaactaactagagggccatagtaccctaattaataaaatcagaaatgaaaagggagacataacagcagaaactgagggaattaaaaaaaaaccatcatatcctactacaaaagtctatactcaacaaagctggaaaagctggatgaaatggacagtttcctagacagataccaggtaccaaagttaaatcaggatcagataaagaatctaaactgtcccataacccctaaagaaatagaagcagtcattaatagttctcaaacaacaacaacaacaacaagtccaggaccaggtaagtttagtgcagatcttcaaagaagacataataccaatactcttcaaactatttcacaaaatagaaacaaaatgtactctacccaattcattctatgaagccacaatcaatgatacctaaaccacacaaagacccaacaaaggaagaccagtttcccttatgaatatcaatgcaaaaatactcaacaaaattctcacaaactgatcaccatgttcaaataggcttcatctcagggatgcaggaatggttccatgtaaagaaatccatcagtgtaatccactatataaacaaactcaaagaagaaaaccattgggccatcttattagatgctgagaaagcatttgaaaaaatccaaaaccccttcatgatgaaagccttggaaagatcaggaattcaatgcccatacctaaacatagtaaaagcaatatacagcaaaccaatagccaacatcaagctaaatagagagaaacttaaagcaatctcactaaaatcagggactagacaaggctacccactttctccctacctattcaatataatactcaaagtcctagccagagcaattagacaacaaaaggagattaaagggatacaaattggaaaggaagaagtcaaaatatcactatttgcagatgatatgatagtatacttaagtgaccctcaaaattccacgagacaactcctaaactggataaacaacttcagcaaagtggctggatataaaattaactcaaacaaatcagtggctttcctctacacagaagataaataggctgaggaagaaattagggaaacaacacccttcacaatagtcacaaataatataaaataccttggtacgactctatctaagcaagtgaaagatctgcatgataagaacttcaagtctctgaataaagaaatcaaaggagatctcagaagatggaaagatctcccatgctcatggattggccggattaatatagtaaaaatggacatcttgccaaaagtaatgtacagattcaatgcaatcttcctcaaaattctaactcaattcttcacagagatagaaagagcaatttgcaaattcatctagaataacacaaaacctaagatatcaaaagctattctcaacaataaaagaacatgtggtggaatcaccatccctgacctcaagctgtacttgtgatttaaaaaaaaacaaaaaacaaaaaactgtgtggtattggtacagtgacagggaggtagatcaatggaatagaattgaagacccagaaatgaacccatacacctatggtcacttgatctttgataaaggagctaaagccatccagtttgggggggggggggaggagagacagcattttccacaaatgatgttggctcaattggtgggtagcatgtagaagaatgcaaattggtccattcctatctccttgtacaaagctcaagtccaattggatcaaggacctccacataaaaccagatacattgaaactaagagaagagaaatcggggaagagcctcaaagatattgccccaagggaaaatttcctgaacagaacacaatagctctaagatcaagtattgacaaatgggacctcataaaattgcaaagcttctgtaaggcaaaggactctgtcaataggacaaaatggcaatcaacagattgtgaaaatatctttaccaatactacatccaatataggtctactatctaatatatacaaagaactcaagaagttaaactccagagaaccaaataaccctattttaaaaatggggtacagagctaaacatagaattctcaattgaggaataccgaatggctgagaagcacctaaagaaatgttcaacatccttagtcatcagggaaatgcaaatcaaaacaaccttgagattccacctcacacaagtcataattgctaagatcaaaaactcaggtgacagcagatgctggcgaggttgtggagaaagaggaacactcctctattgctcgtgggattgcttccctgtgggtgctttgcagtaagtggaagaaattggttcagacaatgggaagggggccacttgcatcacacagatgctgaagatgccactaaatatgccagtgtgcagggcaccaccccctgaaagttccaaatactcagtgcaaaatgtcactactgcaaaaggtgatcaaccttatagaagaatacaaaattataacaatgtgaatatttaaaggcaaaggggcctgtggagcaggtggactgtgccatcagtattttaactggtaaggttaaaataaagcaggttcaaaacccctgtaagtcccataattaaaagctataggtgttagaatcagctcctggccagactctacctgtcctggggcatgtgaccaggataccccactaagaggaccatgacaaccagtcacatagtatgaaaacctggagttctccatgctaatgaggtatctagataagccctgagtgtttagccaatgagtatcccttgctaggcatcccttcctataaaaggtatttaattcctggttcaccctgactaagacatgtgcattcatatctgccatgaatagaacagtttggacaaagaagaaccattgtctttatcaagaatcacctcagggagtggggatgccttcatcataaagagctgtgcctacatctcccgtgaaaggcctctcttccagcccctccatacgtttggcagttccttggagccaagccagattctaccctgtcccaactcctcatgggtcccagtggcatctgggtacacaggagattgagatccacagcatccttcccagatctcacagactgggaccccttcttagactgtgttctgccccctgagtgacattcctgcagtgctccagttctgagcagtgaggcagaaacacagacagtcagaagagtgcttactggatgtacatgttgggtctttggttatatttcagcttattttacttgcccctccccccgaagcaaacttgaacaaggcatttaatctttctaaacctcgctttgccctcattaaggtaatgattatctaacacttatcttaccatttgacagttttctatatttgaaaagagaaatgagggcttggcctgaagtccccataaagttcaaactgtgtggaattggattgaccatgtgagtcacacacctctgctttatcctctagcaagcgggaaatgctttttgtgccaggtagtgaccatgaggctcaggggagtgaacgtgtgtacagatgtcccacagtaccaggaaggtggcaaccacgctgcttaaatgtatattgaatccaaagttttatgagcaccatcctcagagcctaacaagaaagaacaaatacttttaaaaaaatcagtattgtaacttttattattattcctagcctatgttatctattttaaggcagttgttaaaattacatctaatgcgattacggatcgcaaacattttctccttaatttttgcatcagtgatattttactgccattaccaccaatgtttctatggagctgtctcctcctcattaagagcaatgggaacacatgcacatcagcaaagagctgagtactaacccacttcttccccattgcctttcctcaataggttgtagcaactgaagaagatctcatcccgccaagtttggtggagccagcccccagagcagacgggttagactacagaatcgcagctcacattgtgtcgatcctgccttcactctgcctctccgaaaaggaaaagaaggtccgaacacgagcgagccaaaaagcttttgtactttgaaacaaacaaagtgtgcattctctcattaaattgatattattttaatttaaacagaatcttcgtgagatattcttaactgaaggagagagtgaaagcaaagccctgcccaaaggtcccctcctactgaactaccacgatgcgcatgcccacaagaagtatgcactgaaggtaataaccaggaccctccctctcgtagttcatgtaagtaggtgtgtttgtgattcactagttgggggaatctcattggatgatcttaccaaccaatgctaatgagatctcatgtataggatagatgaagatggaggctcagaaacaggagtagacaggagcaaagtatgtcagcaaagagcacttggcctaatcacaggggtccagttaaccacgggcttgattgtcaccaccattacatgtgcattaaagctttataatcaagtacttaaaaattaactgagaggttaagagtacttgtggctggtccagaggacccaaggttaatgtattaaacccatgtcagagaactcagaactggggctaactccagctcccgggcctctattctggcctccaggggcatatacacagagacatacacatatgcacataaatataaatgattctcgaaaaaaaatcatgggcattttctttaaatatctgctgctatgaaagactagtgtaggccaacaaaggatttcaggaaagacagataaatccactccaaacttaggctgcttgtcaccaggaatggagacccacttgtgctccagaaacttctggaaaaatgagaactagattttggaccttattataaatacgaatttgtcatcctcaattacttgtgatgttccctgtttccagatgagagtgacgatatcacgtttggccttctccacacacataaggcatgtgacagctctcgttagtgtcttctgtcatgttgctttccctgtttctttttcttttcttcttttttctttttctttttttattttttttggtaaggaccaaaagaattttgacccggttcaagttgagcaggagatgcagtccaagctgccactgtgggaattccttcagttccctctcccccctccatggaacagcactaaacgactcgccactattcacgagcttatgcatttctgtacgaacggtgagtatcttgctttggctgatacccaatttaattaatagcccttaaattgcacccttattcccaaaaagcattttgatcattgaaaggccttccaggggccttggcgatgtcactagccatgtggaaactctggcgcgtaacattatgcactttgatgtaatagattttctttccattgtgttttcttaatcccctgagccccacagttccccctggtgtcattagagacgatgcaatccatcctacttaccaggaggaatggttcgtgtttctgcaaaaacttaaaaatgaacaagaacctcttgtctcaagttaccatagtccctttcccagaaaatagacaaatagacagacagacagataggtagatagaaacagatagaaataaataggcttcaccaaggaatggagccctttatcattgtagaaatccacacaagtcatatagcacagtggcattagctgtggaaggagaagcaaaagcccgagcaggagactttgccccaactaagcaattatcagtctggagtctcatcctccagcctcaagcacacaggtcgcttttgacttctagaactgtgctcaaaggaaacttgaactatccttgtctctagcctgactcgatagattggacacaacacttatatgtgtctatctagctgtactgataaaatgcaatcactgaatgattctcagtagtagattgggaagtctccaagaaacttgcatctgcaccccatcccgaggagcacaaaggaaaccctgtcagaagcagatctccaccgcttaagtgggaagctgagtttctactcaacatttgacagaagatgtcgaagcctggaccatctctctgtttatccaatcagatggttatcctggggctttcccactagttgcaatgtggctagggtgagagaacagaagagatcatgggtggtggttttaaatacaaacttctcttgtcagtgttctttttagaatcgaagtgttcaattccctctgcatgtctctgcctcccaaatccttttgagagcttccctaaccgagaatcaagaatgtccctcatctgtctttacaaagcaagtttttcagaacaaccatatatcttagccatgctcccttctgtgctgagaaatggcatgcggccaattgttttcttctctatactttgagtcactccacagttctcctttttttttccaggttagaaaaaagaaatagaaggtctgggtcatcagaatttggctggagtgtctatttagtatattgtgagcactttgttagatcacccctgcataggagggcgggaaggaaagaagaaacggtgtgctctggggggcaggagagcaatcgaaaactcctgtccaatgctatcctgagattgaattcagaaaacagtatttatatccagagatttaatttcattttttaatactggcaattgaatctatgactaggcaaatgctagacagtttccctaccagtgagctacactgtcagctacagaatttgaaatatgaagatatagtatagaatcataaaaatctcctggctcaaatgaacattgagacttacctagtccaaatgtatttccatctcataaaaaatccgaaatcctggcaagctaaaccatttattgtagggttgtaataatagtgtcgacccacaagggaagttctggcccctgggtggctctcacaagcatcctttccttatgttactgagctgaagggagggcaaacatcatatgatgtctatttgccttcttggtgccataactgaccctagtcctggggatagcaggttgaatacacagccccttgtcagcataccactaaagaattagcaagagtttgctgaaaggacctagatatagctgtctcttgtgagactatgccggggcctagcaaacacagaagtggatgctcacagtcagctattggatggatcacacagcccccaatggaggagctagagaaagtacccaaggagctaaagggatctacaaccctataggtggaacaacattatgaactaaccagtaccccggagctcttgactctagctgcatatgtatcaaaagatggcctagacggccatcactggaaagagaggcccattggacttgcaaactttatatgccccagttcaggggaatgccagggctaaaaagtggcagtgggtgggtaggggagtgtgtgtgggggggggtatgggggacttttgggatagcattggaaatgtaaatgaggaaaatacctaattaaaaaaaaaagaatgggtagattcaagctaacctttccccatgagaggaaggagagtaggagggaggtgacattctagaattgaggataatcttggggtgtggggtgtgacgggaagttaaagaggaacaggggaaagagcatgatcaaaatctatttgtatgcatgcatgaaagtctcaaagacttttttaaagaaaaggaaattataaatcaatgtttctaatgaatgtaggtattaaactcatcaaaaaaaatcttagcacaccaaaatcagcaacacattaaaagacacacacacacacacacatctaaaatcccatctcatgtcggtgtactcttaggactctgtactgcagactataccctgcagtcaccctgcttcatttttacttacaccccacacctaccaccagactgggccatcaccctgggctatttcagtggctttccagctacattctgtgctttcacctctcatttgtgaatcttttatccatggaaggaccagaacaccctttctgggatgttcatcaggtcttacatcttcttcaatccaaatcttctaacattcatccatttttcaaaaccaatgctatcaaccaggccctgagaagaccctcccctgccagtctttcattggcctgttccactgtctacaatggccttactgcgtccttgaagcaccagtcatacaaaagcctctaaaactctgtccttgccaagttccaagcctcttttcacatgttccttctcctttctcatttttgtcttgttatctaaactctccaccccgccctgctccgccccatcccatcccagtctcctgtgtacagtaagagcataccctttccactttcacttcttatgtcctgattggcttcctttgtcatcatcatatgctgtcgggtgtgtatttgtctctctttggccactataatggtgttgtatggcagctgggagccccatcactttattcaccagctttcattgcagttgctaacacccagtggatactcaggaatgtatttattattattacttctgtttgtctgttttggggttttgagattaatttgaggttgcctggaatgcatgataatcctcttgcctcgggctgctaactactagaattttagttgtgtaccaccatacccagataaaaacaaatgtttattccgtaattcctttgcctctttcttgtttctcttctggatccctatgttgtttttctatgatgctcaattcatcttaggggtggggtacacaggatgaagatgatctaggagtcactaatccagaacaatctatttgactgttattttactgtaacctcattaagttgttttttgttagtctccacctctcaaacttccatcttgaactctgaaagtttgagaactaagtcatgttcttccttgaatcttaggcatctgtagcaaagccaggatgtcactgatagcttagcgactatatgctgaacacaggtgaatagagacaactgatgaatgctaaagtgcaagcatgaaaattagcacttcttacatttggcttcttctgaacctgaatgaatagaaaaacctaagtatcataacctgtagtagacacaatgacgaattctaaaaggcaatctatgcccataaaatcttaaatatacgctatttaaacgaatataagtaacctggaaagttcaggcacgtgaatatgggtaacaaacattgattaaggttatgaagctgtttttagggagtgtcccttggatctcttatatcttttttttttttaatataagagttttttttgttttgttttgtttttaaacacagggtttctctgtgtagccatgactgtcctggacctcactctgtagaccaggctggccttgaactcagaattctgcctgcctctgcctcccaagtgctgggattaaaggcgtgtaccatcattgcctggcagatctcttatatcttaactgtgattttcttagttcccatgcctttgatatttgttgaagacttctgaagcctgtatttaaagtcaggccagcacccgtgatgacatgaacccttggtgcccctcagcccctgtgtcagccttgtattatgcactaacaagagccgttccctgaggcaggggtcatgctcttttacagaagttctgagctggaatgaagtagaacgagccttcaaggtatttacttttgagagcctgaagctctcagaggtggatgaggaagggaggctcaagcccacagaaacgaccagtgacacagatgttgaaaatttcaacattccttgggacaatcctgccaggttcgctaagctgataaggcagcggtacattcacaggatgagcatgcagaaggccccgccagtagtagtaggtacgctacatggaagggagcgggtggggcagccatcctggcactgtgactaatggatgctcttcatcccgactagagattgaaaacactgagagaacactatttgtgaacaagaattttgccaaagctgagcaagatgcacaaggagatgaaaattccccaaattctgacgagcctgatgctattagtgtgacgggttctacttccaactccacaaaaccctggaattctagtaatagacagttctcagaaaaagagaccagtgggtccatgtggccccagccagagtccatgggtaagtgaaagtgtgcataggctctgctatgctgagacagaaacaaagaaacaagttcaaaaggtatcatttaaatgtaagagcttcttcagctgatgagaaagattcagtatttaagttaagaaaacacactgagtcctcccttttcaattctgtttttcaagggatcctctcagttccctcttcctggtgaaaactcaaaaattaattgagttaattaactaatccatttaaaatttaaattaatcaaacttaaattaattaatacagcaaagaattacatattcaccatcagtacttcataattgcttggtaacagtactttaaaattacatataatgattgaacaaaatgccaagtatagaatctgtcatgagaccagaactctgtgaacgtaccttcctctttgcttctattttagttatggacattactcttctcctcgggtacaatcctgtaaataatgctgctgggaggatacagaagggcgctggattaaatgtgggtgtgctgccttgtgcactgctgtcagcagcctgcctgaggcacagctcctgtattccctgcacatcactctcagcagcagccccctactagacaagagtgagccctgcttcacacacctctgctacagcactccttatcctaaaacctctttgcgttttgtccctttcccctacattctgtgctgtatccaagagatgtcataactgagctacacatcccttacattgttacgccttgctattttctgtaatcatttatatgcccagtgtgccctccacagccacagcttgttgaaggtcgtaactatgttgatttatgaaatatcaactttcttttgggctgtgcaaaattgcagcaaatttacagggctgaaattacacagaacatatattctcataatacagtgacagtggatgtcagttacaaaagtgatatggaagtaccatgtgcctgaaattaagaaatactcatacatatccacacctcggtaaaggcaagggttacaatagggatttggacctatttcaaactgagtaataatgaaaacactgggtgtaaaaaaatatatagaatgcagctaaagattctgtctggacactgacggctttgaattaatgaattccaaagaatctgaaaatcaaaaagttaactagttaaactcaacctcaagttatttagctatatgcaaagggcacagtaaagaaaccatcaaggtggctagtccattactacagggtaatttgttttaactatgtgtgtatgtggggggggggggagacagagacagagagatagagagacagagagagagacacagagagagacagagatagggacagagacagagacagagagacagagacagagagacagagagagactcagacgcatctggaaaagtctagagttgagagaaaaaggaacagactggatctgaccagtgctagagaaacagaacacgagaaaagaaatcatttatgttataaggaacataaacatctgggaagaagggagcctgtgagctgcagacagcctgggagttcagggtaaagggggaggtgagaagatgaggggacttggaatgtgtaactggtccttgtgtttggggactgaaggagcctggagaccaggatgtgtctatggaaagctctatgtcccttctgcttcctttggcagatagacagacaggcagctgtttcacaagttcctgaggaatgctggcttttatctaaccaacagaaatccttctacaggtgtgggttcttagggatacctgacattaaaaatgaaaagagtacaggggatgaagtcagtggtggagccctggcctggtatccccaaggctccaggttcaatccccagaacagaaagtggaggcaaacaattttattctactaaatttaaaaatgaaatgggcaaattactgaaattttgaaatttagcaaaagtgatcaaacaagagaaaacctaaacagttttgtaagcaaattatctagttgttcaaaaaccgccctaagtaggacattaccagcctggaagtggtatgccattggcaaacgatgccaaatcctcaaaagcacagactactataatctcaacaaaaattattccagaaaatagaagatacaatatcctcccttagtaattgtgtaagattatcataaacattataatgaattttgcaaagatggtcagaaaagaaaaaaaatacttagtaatgagcatagatataaaattctgctgtaaaatatgagaaagcctaatgagagagaagacaccaaacaataatagtatctcccaacaaagttacattttaagatcaggaggaaaatacacttaaaaaatatgacttattaattaacatattagtgaataaaacatcagtttctagattgtaattataaaaacacttaaattcctatggtaaccaattaaaaaagtcttagtgaacatcaattttatgaatgttgttcttagaacaataaacattatatgccacagtgaaaatagccctttccctttatgatctgggtgcatcccaggctagacaactcatccacagaaagtaagataaaagtatggcttcaagaagaaagaaacaatgtatcactatttgtaactatatgggaaccgaaacaatccccctacacactcaggttacagctgcagagatcaccaaaggagccggtgttttttaaagggtgccaatgggactttgatgtttgttgtgtgaaactgtcatactgtgggatctttcctgtgtgggtgtgttccagtgtacagtaagtggtaaaaaacatgttaaaggtacctgcaagcacccccaaaactacaggagttaagctggtgttgactctggtgatcttgagatatctgaatgagaggcgaagaaaaggtcagaagggaatagatttttcaaaggtggcctgctagccgtcagcaggggaagtattggaaggagagaaaacagaagttggtgctgatttagcctcgctctgctgtaccccaagttccatgcctcagcatgttactgctttatagaaaccctgaacctatacgcaacaagctatcacctcagttcaagagaggagaaagccaaagcaaacagatttaaatttcttgtcccaccacatacagataggaaacagaaaagcagtgccctctacctcacctcagaacaaggctccctaggccccagaaactcctcatgatgctccctaatagtttggtcatgtctgaatttctttgtcttgctgattctttttttttaattaggtattttcttcatttacatttcaaatgctattccaaaagtcccccataccctcccccgtcccactcccctacccacccactcccacttcttggccctggcgttcccctgtactgaggcaaattcttatcccttatcctggtttcattgcctgtttcttccttcccaacagtagattccttctatgtcctaagtatgattacctggtagcctcgctcacaacacacacacacaggcacatacacacacacccacacacatacacacacacaggcacatacacatacatagaggtatggggagagatagagagagaagcagaataagttaacactgtttgttaggatatcatacctcctggatgcaaacaagcatatgatagaggtcactttgtgttaccatggaaccagaatcccctgggagagcagcgagtagacagaggtgtttgtttagctctgttttgtttttctgcaggcagctctccagtagagctttctttccccaggcaacttttgccaccttgtggtcaaaccactcacatggtgtggtggagccattggagagtgaaggactcggccactatcaatcgtcaggctgaactatgacttagagagtatgtcccaagaacccagcgattttgagggtggattcctagtcctacaagcttcctcatggagaatgcagacttgcactcaggagcactcagatctgagcagaggaggtggccaaccttgtatgtctgtgactgttcccctaggaggatgacgatgatgtctgagcatccattttcttcctaactctagttcatacttcaaaagcaaccactctaattccatttaaatgaagcagaaatcttgtctgtgtttccctgcacaatcactttggtatcatgtgcactgatgtgcctgtttctggacatgaagggctgaatatttgtccttctcctcaccaaaccctgggtttccatctgagactgtttttgaacttgacagggcccactggatatttatgaaaaacctgagagttgataaccataaggctgtaggtttagatgtgccctttatgcttgttgggtgtttttttaataaagtaagcgctttgcagagggatcttgttatctctaaagtaaaacagattaggaaagctgtttttcaaagggacggggaagcgtccatttccagatgtgtcaaagactactgaatcacactgtcaaaggattatgtggttgaaatcaggaatcagacaagagagaaataaatggcttttattctactgtgaaatcaggagctcagcttagtattaaaatgttctttcctttgacaaaaatcactggtgtataagttttgaacatactttctaaagagttggttttgttcctggatctttagacccaagagggaatatcaaatctctcagaaatctggcaggccataggatagaagaatttttattctacagatttcatatcaattgctccaaagacacaggggacatcatggtctatttagaatcatagttggcctgagttctgtcttcagtggatatgtttgtacaaatgctgaactaaattggctttaacatcttctgctaagagggagcatccattctgtcacctgcaacaactgagggacaaaaggaaacaaggaccaaagatgtacatagatgtgctcttgaggtagaaaagcattagccagtccttggtaggcatgggtaccttaccactctagaatcccatgtgtgggtctctttgcaacaaaatgaaaatgtaagtctaatgcttactctcagaatagcctttcaaatagatttgcttccacatttctgttttctatatggctctgccatcccttctagtttcatatgtcacatagattcaccccattcaatccgaaggaaaaaacaaaacaaaacaaaacagcactgactgcccccaccccccaggtgctggctacatagcattcactgagggcacagtcttgttctccagtgacttgaggcaaaggggcagaccatgagcaaataggatcccaccccatcaatgctgtgatttataatgaagcacagcaagagacagaagttctcaggaaggtggccagagtgtgaaacaggtgaataacttagaagaaaatttggcagacagaggaaaagccgaatatagaactgcccacacataacaagctggccagtcaatctgaagtgggaaaaacaagagctgggaggagtgtattggaggagggaggctgcagtgttttgcacacagctttgtagcatggaatttgcaattattctcaagccaataaaaagccaggttggctcagccactcagcaacaccaaagtatgctcccaaaagactttcctctcaagagtactccatttgtttcatcagatgtgggggacatgacagtaggtatttcctcaggattctctgtggtgtcttattaaccctggtgcacttcatgaggtaaaaattgccggcatagacctgctcctttctcatctattcagatggctgctccttcctagctaaggatgctatcactcttgttcatggggtagctgatgtgcctcgctcctggcagggtacactggaacccaggtacccactgtcttacccatttaactgatgcctgttaaactctacctggcaatgtgcacaggctccttaaatgatacatcaatgagtggccagaagatctcaacagaatgatagaatgctaccactctaacaggtgaattcattcctagttatcctgtttatatgacctcacccttctgtcatctatcaggcaaagctcacagaagtctgcagaggctttgtaagggtcaccagagggaggtgaatggacacagtgaatcggtgatctagcttagccagtaaatgtttgcagtttgtgaaggcaaaggctgcactgaaagaagtgagcaatatgcagtccaaaggaagaatggctggcgtgatttagtgcacatcagattagaagccaggttcttttcaaagactctaagtaggcactgacttagaattatcgacacaaacacctttttggaggcacgaaacctgcctctcaggaattacctttttagcacggaaacatagatcatatgggcaaccaaagagccacagcgttggacagaggcaagaacaaagcccaaacacaactgcatgttgctgtctttgatttacagatcagaccatggacactgagatcaaagatgacgcagccacaaaggatgattctcctgaaaaagtaaggaatcattttccttaaagtgtagatgacgagtaagatgatctgagaaaactcctgaccaaaaggtggggggggggggggggagacagagacagagacacagagagagacagacagagagagagagagagagagagagagagagagagagttgtaaaaggaaaatgttgatgccagggtgatgttatttagacatcccatcccaaccccatctggagtgaaaggggttaaacttactagcctcactaactgaagtaaaacttcccagctccctgcccctctctagacagtgtggcttggcaacctcacaaacacctgctgaccatacagcccatgtagaactaacactgtcttgaagtgagttcagaaaacctgcctataattgctaacaggactccgaagagtataacctaacaataaaaatatttaggttatgttgcacatttgaaaaaaaaaaaaaaagagtcaaaggcgtacttctttctggcagcagccctcctaaaatgttgccatatggcgctatacatatgcagattcccacaattaaatggggcgcatgggggtgagtccacagagcctaacagggctccatttggactcacataaatttgagctgaaagtgtgttcctgtgatttcttctttcttttttccttcctttcttcctttctttcttcctctctttcatttttttttttttttaagaaacccaagaagatggtggtggaagccgacatagaggacattaaaaaaacgcaacagcgcagtttaatggactggagctttactgaatattttcagccaaaagtcctgcttcaggtatttatgggctgtgattctccaggagaggcacagggatagttctggagaggtgagctgtaactgtgaacagttcacttctgagctgtgcattcccaggaaatcccccaaatggttggaaatacttctgcttccataaagacatctgtactaggaagcaatgccatcccctctcccctctccccactcctcttctatttagacttcattgtgcttcatggtgctttctgttttgatgaactggtcaatggtagctgtgatagtcggctgttactgcactacgtgctgtgtgctaggccttggctggtatgtattgtaagtgtattcctaggaataagcctatgacatagaaattgttaagtcgtagataccaaggcaccttgaccaaaggtctgttgctaagtgagaaacaggaagaaaacaaccaagaaaggaatgtgctccatccaaacgtgcttttcactgctataagaaaaacaatagtaagaaatccagaaatgaacacgtgctcattttagattttgcaaaacctgtgctcagaggatttatctttctaatttgaatctcattttgatcggatttttatatcccagtatttttaaagccagaagaatctacaaggccatgttatggaaaaaattatcaacttctgaaccttatcaatagtaaagaaaaatggtcttcttcataaaagaaattaaacaaaaaagaagacagagtcttatggcactccacccacatgtagctataggggccaaacacactaaatttcaaagacttgacttggcacgaaataatgatatatcttgctcataatttttatattcactatacatgggaatgatagcatttcatatattgaatgaaacaaatacagattttacctgtctcacttttcaaaatgtagcaactataaaatttagaaatacatgtgtggccccatttgtgactcatttttgtgatttagacatttacattatttctgttttctccccagtgtgcctctccctcagtgggaactagggtcctctgctctttatccccctggctcaccttctatgggttgccacctgctcttctgctgcagtagggaacagacagtcgcctcataaactagactgacaagggtacctgtgaggtctcaccatgtcaattttaatttacccccatcctcaccttgtgttgaaatgtcctaactatcagactgctttgggtttcactctggtccattctctataattcaaatatttcactcacttgatcagaaggcagagagacctgtagcaaatcttactccaatttaagaagaaagttttgtttcttgtattcatttgtgtgtcctggaaccgtgcctgacacttagctctctttctgctgatcatttctcgctgtggtggatcatttcttgttggcttccagttctggctatcaaccccaggcccttgcttatatcagacaagcatatcacagtgaattacagcaccaccactgttcactattcgtgaactacatgagaccaataataacgtgtaaagagcaaaccccagtcggtcaaaaggaaagataatgcaaacacttcaaatgctgagaacctgtgatggcttggaaatctcaccactacattccccaacagtcaaagacggcagagctgctgttgtcgaaaaggaggggcacatgttcgctgtaagcaaacacttgtttcctaggtttatgtctcagaggaatttgcctttcaaaaatagtaggtaaaaagtgggttgtaaggcaattgtattttaactgcctaagaaaacagatgtcaacttttaagagactctgcgtggaaacactcatacagatgactagactggaaataaatttattatttacaatttattactagtatagaaatggaggcacaactgaaacaaacttttcctggcagtgcttgcaattcactgagattatccgcatggcagaacacacaaagctacatacggtaaattggcactgaaaacacccccacggtgtccacttccttttcctgtggacacattccttcttgttgactgacactgagaagaaaacaggacacgcagtgatgcctttgtgccctctgcttgtggctcccactacagtgcaggttttgagtgttatatttcataacaggccagaggtgtagcagcatatatcagaaagaccatgcacttcatgtcactatagccatgcagtatatagaaggcacagagagagagagagagagataggggagagagagagagagagagagagagagagggagagagagagagagaggaaagagagagaatcagagctggaagatagctggcttcaactccagaacctacaaaaccctcttcctggcagctcccttatcatgctggcaaatgagacctgatatttagaaataggaaaaaaaaatgttagttagtaccttagtctactcaggctgccataacaaaatacttcaggctgggacacttaaatagtagaaagtgtcggcatgtaagatgtgtgtactggctagttttgtgtcaacttgacataggctggagttatcacagagaaaggagcttcagttggggaaatgcctccatgagatccatctgcaaggcattttctcaattagtgatcaagtggggaggtccccttgtggatggtaccatctctgggctggtagtcttaggttctataagaaagcaagctgagcaagccaggggaagcaagccagtaagtaacatccctccatgacctctgcctcagtttctgctttctgacctgcttgagttccagtcctgacttccttcagtgatgaacagcaatgtggaagtgtaagccaaataaatcctttcctccccaactgcttcttggtcatgatgtttgtgcaggaatagaacccttgactaagacaatgtgtaaaaacaaaatccaggtgtgagtatggctgggttctgatgggacttgtttcctgcctggcacacgatactgctctgctgagatattcatggcagagagagggaaaagagagagcaagctctccagtgtctcagatgacaaggacatagatgccatagtgagatgctcaccctcaaaacttccccaaaagtcctcaaatctcagtgaattacaagttcagtttatgaacttggagcaggtcaagctcatcctagcgtatgatgccattttatctacaatatttaataatgctaaaaatgaattgatctatttggaagcaaagaaaactgttagattaactgattgttatctactaacacttgtggagagcacttagcaagtgtctccacccccgaggcctacttttatttaattctcattttctagtagttagaaaagaatccactggaaacccagttgatcaacaatgtggtaatgagagagggaaagtagggtgagggatgctgctctagcaatcacctcttctcttgggggtaggacaatggagcaatactattcattattctaccttcaggttcttcaggaggctcaccagcaataccgatgtgttgactcttactaccacacgcaggataactctttacttctggtttttcataatccaatgaatctacagcgtctgcaatgtgaacattggaatattgctcttcactccaacgtcggattcaggtgacttagataattctgctaaattttggctgagtttgccacataggttttggttccttgatctggtctttatggctcaactcaatgaaagcatttatattgtggcatagattcaactgagctccctaaattaatatgtatcatgtgctatggttgtacattgtgcttacgtattgacactatagtataaggagtgaataccactcttgcctgcatagaatctaatagagatactattaaaatagtttccattcatttcaaactgtaataagattgagtctgtgacactgaagagacaactactaaactcttggttctctgatattgttagctctagtggatctgaaaaagagtccagggtaaagaaactgaagactatcaaaacacgtggtcaagttcacaggaggtctaagagccacttagtctttttaattctcagtagttatttttgtttgttttggttttgcttttcatttgtgttcccttagaacgcagccctctccttactaataacctatgcctcttgttatatcaatgctgtctaatgcatactcagtacgcactgtatgtatagcaatacaaaggacaaataaagtggacctgaggaataaattggggagcaaatggccataaacacgttcataggaaggttttaagatgatttagggtaggtagtaggtatacttgtactattagtctgtattgctcttttttttctaacaatatttttattgattatttggggatttcttatcatgcaacccaatcacactcacttccccccaccaaaaaaaaaaaaaaaaggaaaaagaaaaagcaagtccaatttgtgttgtccatatatctactgtaacatggtaaaactcctggtggctggccccctaaagaaaagtaagtctttctccacccacacccttggccagaagctatctatttgctacatccatcatccttatcacaataggtaagagtcctcttcggtggcttcctttttaggctgttattttgggtggggtaggggttgtcattgaagccttctctgtccttctctcacaactgtgtgtctgaggtcatccgtaccactgcaaaagtagcctccttgcccttttcagtcagcaggagcctggagcctgggcttctgtgtggtttctggcaacagcatggacacaaacacccacatggtctccatcagcactgcatgccaaggacctctgtttggtctctggtggctgcacaggccactcaggaggtcatcactggccctggctatagtagaaccatgagcacaaaatgggcttctgcagcggtacagaccacgggcatccacatagccctccagcttaatcacagcctggggcagcagtacaaaccactgataccaccatggccttctcgagaagcatggaccatggaagtcttttgaggaggtccaatctaagaagtgaacaattgttcatctaagttatcttgtcattgctcagaggcaggcagggtgaacctgcgactgtgcagctcattaagggactgggtctgctcaagtgccacactgctgcataccactctgctgaccctactgggcaacaacatgttcttccatgggtttctgccttctctcccagctgccacatttgtagctcagcccatgtccactgtgcattcactgctctgttcctctgtcttttccacgtcttcctcacatactcgttcatcatggtggcactggaagcagcattatgtcactcagtgtgtgtgtgtatgtgtgtgtgtgtgtgtgtgtgtgtgtgtgtgtgtgtgtgtgtcaaacagcttaacatgtaaatgttcattgcaatgagtcattggtctggttcaaggcctctggcttctaccacaccatcaatattggaccaccaccacccaccactgaaactcttctctgatatcctgctgttgtgcagagtcaggcacagagatcctgcagctcttgttctgcagcactggctctgccatgcactccagcagctcacagatggagtatatattgacatagactgactcaaagccctagatctgggtcggggtagaagctgagttggtcatcccagaccttccaccaccagtggggccttccttcactccccattctttgtttttcagtgacaatgtttatgcttcgtttccttcctagcatcacttgactattggaccccagtgtaactctgagagagcattccctccactgtaaccctgagagagcactctcatattgctataggagttagaggaaatattttgaggattcaatgcatagggatttttgttaatatcgctcatcagttaaaaatgttactctttttctacaacaatggacatattcatatttttcttttaagcagtgaacctgctgaattttaccagtagctcttcttgtgttgaagactctcattgctcaagaggactctgcattgtgtttctttgctttgctaatgtactacttaggttatccatagctttgaatgagcaaggcttggctgtttaatctttaaatgtttttatttggctctgatatacatggtatagaattctcataagctaactggggtggggaaggtccctgtttatttccacgttttattttttggaagagtttgtggatgactgagatattttcctttgatgactggtacaacttgataataaaaacaactgcacctaggaaagtgtttagacactcatagattttctattttacttttacaattcttaaattggattttaaaagccaaagcagagtggcattacccatgtaataccagctcttgacaggctgagtcacgagggataccttgagttcccaagaagccagatctacctacctagcaagactgtctcaaaaagttaagaggaaaatgcactaataataactatacttggggttggggatttagctcagtggtagagtgcttgcctagcaagtgcaaggccctgggttcagtcctggttgttttgaaaaaaacaaaaacaaaaacaaaaagtctacttacaaaaactcattaatggtcgaattctatagaaacacatcctgacatcagtaacatgatgtagacaattaaggaggaaatggttttatatgtgaccaaagtaaagcttttcccagcctaaaatacattgtcgcacgtgtaggaagttttgagtgaatttgatattaaccagcaagcaaaatctataataaacacaaagaatacaaagcaacaattaccaaagcagaacagctcaaaactcagagcatcagaaatgagtaaggaacttctgagaagaaaagaagatgcataaaataacaatagtgaatccttacttatcataccaaatacaaacgtatcagattatccagtcaggaggcatagggtggatggatagatgataaacgatcactgtaagttgctacagaaaagttcacttaagggagtatagagatctaatgtgaagaaacaagaaacccgtgctccatgaaaatggtcactgaagaaataagagatgttttcacctttaacagacaaatagacatcaaataaaaatatttaagagatgaacaacttcatcactctttcaacctaatgctggaagtgctagctagagcaaacagacaaaagagagaacagaaggcacccagattaacaggaaaaagtaatgaggtattttgtttacagatgacataatctcataaatagaaaaccttaaagaccacacacacacctgctgttagagatactaatgaatttagagatattttatgaaacatagaaaagttagttgtattttgatgccttgacaaagaacatctaggaaagaatataagaaagcaaacccttttcacagcatcagtaagaataaataaggggtgagatatctatacactgaaaaataacccagatgagtgaaaaggtattctgtggtcctgagctggaagaactaattgttaaagtgtctatactacacaaagtgatttccaggtttattttactcctactaaaaatgataacattggcctgaagaaagagtacagtggttaagagtacttgttgcccttgcagagaacttggggtcagttcccaggacccatagtgtggctcacaactatcactcactctagttccagaggactcaacatcctcttctgacttctgtgggctcctgtatgcctgtgatgcatatacatacactcaggaacctacacacgcaactaaacaattaaatataaagatatgatgtcagtttgtataaaatatataaaccaattctaaaatttgtataggataaacactaattgcctatgttttcagtacctttaaggcaaatcctttattcaagttttctaattctttatttggtatagataaaacacattttccttatgagtaatatataacctatttaagcaaagtctgttcatgataaatatccatttcttaaagggatataataatgtctgtccttaaagcaaaaaatttgtgttttttatctctctctctcctctctctctgtgtgtgtgtgtgtgtgtgtgtgtgtgtgtgtgtgtgtgtgtgtgtgtttacaagcagagtgtatgtctctaaattcatctttgattctgtgtgcttaaatgtatctttcttagttgatggtaactttaaacaatacaataaaaggcccatattatcgataactacactaatggaaaattagcttaagttaaagagaggacactttctctatctttggtcagtacttcgggcacagagcagctggacaaaccccaccagaaacaaaggcttctaagttttcccaagcattaaccaccctcacatttttctatgtcatttgttttgtggtagcatttccttcacataatagcctggatttttatccaaaagtatgattctcaagggattctaatatgaattaataacaattttagggatattaaaaacaatatatgtgcttttatttccattgatgtggtttcattcttactgtttaattctacaaatatgtttctgttttagtattaatccctttcctttggtagatggaattttcttagttcctccttagtacgtgccttttatgatataattctatttgtattcttttataaactgtacatgctcatttaatttatagttaattattgtatatgacatctggagttactgagtaccaatgctatttcattaaaatgctaaaaatgcaaatgcagtgccttcatacctaacaagcaatagtattctgtggctacgatgaaacaccatgaccttataaaatgcttataaaaggaagcatataatggaggactggcttacaaaagtccccatacacttgcacagtctcaacactgttatttacaagttctgagattcaagacactctcttacctacaaccccctgtaaaagcaaaagcaaaaagaaaagcaggtacactcatcacacagtagcatagcatatacattaccattccaaaagggaggaaagtgaggagatgctgggccacaggcagcaggaccaactccaactctgtatctctacatctgatgcaaagctgtccctatctgatccaaagatggttgttttctgctctctctctctctctctctctctctctctctctctctctctctctctctctctcccctctttcccccaccccccagtctggttccacacctggtctgcagctctccttgtcaagttacccaatggttgtgacacttccagcatcttagagactccaaagcaacccaggcttcaccttcacagcttcacacaatggcctctctgagcctccactcagggactcccctgccacacacctggcctcaatggctttccttaaacatggtggaagattttacaactccttttccttatctttcttgattttaattccagaaccacatggacaaaactgctgagttcacctggtcccctccttgaattacactcacacatgctttcagttattgtttaggcctgtgaaacccctcagacattttcctttctcctgtcacagtattatctgggtggggtcttgccctgtggtacccactccctttattctaagtagcatcaggcttttcttcaaatgtgtcttttccttgagcacaatactgcatttcctggtactctttttattaaaccatacattccatagttctctttgtcctacttgctctgttttattgtctatgagcacaagggtgatcactaattaccacacaacacaatcaatacaaggttgtcttgaaacctctcccaaaactcttcaatttaggctcaagcagacattttaggacaatggcaaaaggagtcacattctttcccaaaattatcacaagaatgatctcttggtcagctactgatattctttccctctaaaccctcttgagttgagccaccacagtctacatcagcctcaacaccactggcttccatgcaggccctcatgcttgcagagcatacatttcaccaacttagccatctcctcannnnnnnnnnnnnnnnnnnnnnnnnnnnnnnnnnnnnnnnnnnnnnnnnnnnnnnnnnnnnnnnnnnnnnnnnnnnnnnnnnnnnnnnnnnnnnnnnnnnnnnnnnnnnnnnnnnnnnnnnnnnnnnnnnnnnnnnnnnnnnnnnnnnnnnnnnnnnnnnnnnnnnnnnnnnnnnnnnnnnnnnnnnnnnnnnnnnnnnnnnnnnnnnnnnnnnnnnnnnnnnnnnnnnnnnnnnnnnnnnnnnnnnnnnnnnnnnnnnnnnnnnnnnnnnnnnnnnnnnnnnnnnnnnnnnnnnnnnnnnnnnnnnnnnnnnnnnnnnnnnnnnnnnnnnnnnnnnnnnnnnnnnnnnnnnnnnnnnnnnnnnnnnnnnnnnnnnnnnnnnnnnnnnnnnnnnnnnnnnnnnnnnnnnnnnnnnnnnnnnnnnnnnnnnnnnnnnnnnnnnnnnnnnnnnnnnnnnnnnnnnnnnnnnnnnnntggagggggaggggacctgatcttgtattgggtgagggaaaggactgaagccctgagggccagcagaaagaatggaaacagcaacctcaggaggtaggaggttggggaaccctccagaatgcaccagagacctgagaggtgagagactctcaggactcaaagggagggaccttagatgaaatgcccaacagtagggacaggggaacttatagagccctcctccagcaggaagagaggtcaccaagttagggaggggattgccatcccacaaaactctgacccataattgttcctgtctgaaagatctgcagggttggaaatgtagaggagcttgaggaaaagaaggtccagtgacaggcccaaagtaggatccagctcaaggggaggtcccaaggcctgacactgttacctaggtagtggagagctcacaaaaagggacctagcatgactgccctccaaaagacccaacaatcagctgaaagagtcagatgcagatatttgcacccaaccaatggacagaagctgctgacccctgtggttaaattaggggaaagctggaagaagctgaggcggagggtgaccctatagaaggaccagcaatctcaattaacctgcactcccccaacccccccccccgagatctttcaaacactggaccaccaactaggcagcatacaccagctgatacgaggctcccaacacatatacagcagaggactactgatctgggttcagtcagagaagatgcacctaaccctcaagagactggaggccccagagagtttagaggtttggttgggtgggaagtagggacatcctcatggagacatggagtcaggaagaaagtatgggatgtggaacagtcagagggtggaccaggatggggctagggggagcgaaaaaatctggagtgtaaatgaatagaaaaaagaaagaaagaaagaaagaaagaaagaaagaaagaaagaaagaaagaaagaaagaaagagaagaaaaggaagggaaagggaagggaaaggggagggaaaggggagggaaaaaaggagaaaaaagggggagggaaaaagagagaagaaaaaagggagggaaaaggggggaggaaaaggggagggannnnnnnnnnnnnnnnnnnnnnnnnnnnnnnnnnnnnnnnnnnnnnnnnnnnnnnnnnnnnnnnnnnnnnnnnnnnnnnnnnnnnnnnnnnnnnnnnnnnnnnnnnnnnnnnnnnnnnnnnnnnnnnnnnnnnnnnnnnnnnnnnnnnnnnnnnnnnnnnnnnnnnnnnnnnnnnnnnnnnnnnnnnnnnnnnnnnnnnnnnnnnnnnnnnnnnnnnnnnnnnnnnnnnnnnnnnnnnnnnnnnnnnnnnnnnnnnnnnnnnnnnnnnnnnnnnnnnnnnnnnnnnnnnnnnnnnnnnnnnnnnnnnnnnnnnnnnnnnnnnnnnnnnnnnnnnnnnnnnnnnnnnnnnnnnnnnnnnnnnnnnnnnnnnnnnnnnnnnnnnnnnnnnnnnnnnnnnnnnnnnnnnnnnnnnnnnnnnnnnnnnnnnnnnnnnnnnnnnnnnnnnnnnnnnnnnnnnnnnnnnnnnnnnnnnnnnnnnnnnnnnnnnnnnnnnnnnnnnnnnnnnnnnnnnnnnnnnnnnnnnnnnnnnnnnnnnnnnnnnnnnnnnnnnnnnnnnnnnnnnnnnnnnnnnnnnnnnnnnnnnnnnnnnnnnnnnnnnnnnnnnnnnnnnnnnnnnnnnnnnnnnnnnnnnnnnnnnnnnnnnnnnnnnnnnnnnnnnnnnnnnnnnnnnnnnnnnnnnnnnnnnnnnnnnnnnnnnnnnnnnnnnnnnnnnnnnnnnnnnnnnnnnnnnnnnnnnnnnnnnnnnnnnnnnnnnnnnnnnnnnnnnnnnnnnnnnnnnnnnnnnnnnnnnnnnnnnnnnnnnnnnnnnnnnnnnnnnnnnnnnnnnnnnnnnnnnnnnnnnnnnnnnnnnnnnnnnnnnnnnnnnnnnnnnnnnnnnnnnnnnnnnnnnnnnnnnnnnnnnnnnnnnnnnnnnnnnnnnnnnnnnnnnnnnnnnnnnnnnnnnnnnnnnnnnnnnnnnnnnnnnnnnnnnnnnnnnnnnnnnnnnnnnnnnnnnnnnnnnnnnnnnnnnnnnnnnnnnnnnnnnnnnnnnnnnnnnnnnnnnnnnnnnnnnnnnnnnnnnnnnnnnnnnnnnnnnnnnnnnnnnnnnnnnnnnnnnnnnnnnnnnnnnnnnnnnnnnnnnnnnnnnnnnnnnnnnnnnnnnnnnnnnnnnnnnnnnnnnnnnnnnnnnnnnnnnnnnnnnnnnnnnnnnnnnnnnnnnnnnnnnnnnnnnnnnnnnnnnnnnnnnnnnnnnnnnnnnnnnnnnnnnnnnnnnnnnnnnnnnnnnnnnnnnnnnnnnnnnnnnnnnnnnnnnnnnnnnnnnnnnnnnnnnnnnnnnnnnnnnnnnnnnnnnnnnnnnnnnnnnnnnnnnnnnnnnnnnnnnnnnnnnnnnnnnnnnnnnnnnnnnnnnnnnnnnnnnnnnnnnnnnnnnnnnnnnnnnnnnnnnnnnnnnnnnnnnnnnnnnnnnnnnnnnnnnnnnnnnnnnnnnnnnnnnnnnnnnnnnnnnnnnnnnnnnnnnnnnnnnnnnnnnnnnnnnnnnnnnnnnnnnnnnnnnnnnnnnnnnnnnnnnnnnnnnnnnnnnnnnnnnnnnnnnnnnnnnnnnnnnnnnnnnnnnnnnnnnnnnnnnnnnnnnnnnnnnnnnnnnnnnnnnnnnnnnnnnnnnnnnnnnnnnnnnnnnnnnnnnnnnnnnnnnnnnnnnnnnnnnnnnnnnnnnnnnnnnnnnnnnnnnnnnnnnnnnnnnnnnnnnnnnnnnnnnnnnnnnnnnnnnnnnnnnnnnnnnnnnnnnnnnnnnnnnnnnnnnnnnnnnnnnnnnnnnnnnnnnnnnnnnnnnnnnnnnnnnnnnnnnnnnnnnnnnnnnnnnnnnnnnnnnnnnnnnnnnnnnnnnnnnnnnnnnnnnnnnnnnnnnnnnnnnnnnnnnnnnnnnnnnnnnnnnnnnnnnnnnnnnnnnnnnnnnnnnnnnnnnnnnnnnnnnnnnnnnnnnnnnnnnnnnnnnnnnnnnnnnnnnnnnnnnnnnnnnnnnnnnnnnnnnnnnnnnnnnnnnnnnnnnnnnnnnnnnnnnnnnnnnnnnnnnnnnnnnnnnnnnnnnnnnnnnnnnnnnnnnnnnnnnnnnnnnnnnnnnnnnnnnnnnnnnnnnnnnnnnnnnnnnnnnnnnnnnnnnnnnnnnnnnnnnnnnnnnnnnnnnnnnnnnnnnnnnnnnnnnnnnnnnnnnnnnnnnnnnnnnnnnnnnnnnnnnnnnnnnnnnnnnnnnnnnnnnnnnnnnnnnnnnnnnnnnnnnnnnnnnnnnnnnnnnnnnnnnnnnnnnnnnnnnnnnnnnnnnnnnnnnnnnnnnnnnnnnnnnnnnnnnnnnnnnnnnnnnnnnnnnnnnnnnnnnnnnnnnnnnnnnnnnnnnnnnnnnnnnnnnnnnnnnnnnnnnnnnnnnnnnnnnnnnnnnnnnnnnnnnnnnnnnnnnnnnnnnnnnnnnnnnnnnnnnnnnnnnnnnnnnnnnnnnnnnnnnnnnnnnnnnnnnnnnnnnnnnnnnnnnnnnnnnnnnnnnnnnnnnnnnnnnnnnnnnnnnnnnnnnnnnnnnnnnnnnnnnnnnnnnnnnnnnnnnnnnnnnnnnnnnnnnnnnnnnnnnnnnnnnnnnnnnnnnnnnnnnnnnnnnnnnnnnnnnnnnnnnnnnnnnnnnnnnnnnnnnnnnnnnnnnnnnnnnnnnnnnnnnnnnnnnnnnnnnnnnnnnnnnnnnnnnnnnnnnnnnnnnnnnnnnnnnnnnnnnnnnnnnnnnnnnnnnnnnnnnnnnnnnnnnnnnnnnnnnnnnnnnnnnnnnnnnnnnnnnnnnnnnnnnnnnnnnnnnnnnnnnnnnnnnnnnnnnnnnnnnnnnnnnnnnnnagagagagagagagagagagagagagagagagagagagaagaggaacagaatagcagaagaaagaataattcaaattacgatgcatcctgaatatatcattcatctagctttatgttttcaaatattaaacctcacttaatttttcaaaactagtatttctcaagtctaaatgtgtccatttatttcctttcagaagggaactctttagatatagatatagggttataaacatttcacttaaaaatacacacacactgagcagtacagtcaaaaacggatttgcaagcagcaatggatcattcttagtaagcagcaactcctgggaggagcacagatgtgtgagcagcttacagaattggatctatacggtagatgctcccaaagccaataaaccttatagcaggacaagaagtttttctctaatgaagtaactggagtagctggtgaccaaggaaaaggatttctgatgtgctgtaaagttagactgagaagatactggttgtactgtgtcacatcccaaaaatcagtgctgacagtgaccttttcttcaacccaactgccaaagactctcttgatgttaatccagagagggctgagcagttaaagctccaactgcccttccagatgaaggttcccagaacccatgtcaggaggtacccggccagctgtaactccagttccagaggatctgatgttctcttctgcgccctgagcatacaggccaatacatacacataagttaaaaagcaaacctttccaaaatctctttagtccttcacttgaatgggaagacttcactgttaatctttacttctttagctgtgaagagaagtgggcatttttccaacactcagccaagagctgtacctgacctcttttccccttggacagctcagaatcatttcattttgaagagttcgttcacaccgctggcacccagtgttctcacgggctttagtaaggactctcaccccccatccttttatctttgtctcatttaggaattacttagaacttgttgcaaaatctattgaagactgggtcacacaggaagaagcgaagtaccaggaagccaaaatggctgaggagctcaacaggatcaggattgagttggaactgaaagccactgtcaaaacttctgctagcaaaattcctggccccaaaagatctaaaagtaagtagccagtgcatttattcatagagtgataggcattctcctattttaatttcaaacccaaatagtccaagattaaaaggttgcccacaaatgcctgtgagtcttcactttctctaacaaatagaacagctgccttcgaaatgtgatgacattgtacctgagtcagacacaggaatatttgtcactgccccatctcctatgagctctgagagatttaatctgttatacagattagatacgaagagttagggaatgccaacatccctgatgatagaatctgtgggttccatcaaatatatttactggcagcgtgagaagtaaagacagagttagtgggtctcaagaggatagttgtagattccaaaagcaagactaaatcaagtcttcttcaagcagcaaataaataaacaaataccccctggaagtaggaatccaggaggaagtgggaaatgtttgccagaagtctgcggcatgtacttgaccagatcgtggataagtatacatctttgattttgttcatctctaggtcttgactagtttctagaactttgggcacataagggaagagaaaagagggtaacaaagagcaaggtcatttttaaggaaggcaataaagaaataaaatatagagttcatctagaaagtatagacatttcacagtccatagaaaagcatctctttctgctagcactaatacttatgatagctaaaggtgaaagtgacatcttatagtgagatcaagatatgaaacttctcaaaaatctgcagcctccttttgttactagaatagtttgtatatgtcctggctctaaagcaaaacataaaccactctaataaggaatcctttggtatccagagaaacggctatattatcagtagttgagcttcctcctatgggagcccaagtcttcactaaatgcttagagtaatgagagggacaatgtaagaaatgaaagaaaggtggtaagggaaatgctaaccactttttagatacaatgctactgagcaaaccaaaacctcaatatctaggatataaaccggttatttcagtggggggtgtacctggcaggtactgaaccaagtctattcctgtcagaaaagatatcataatgtttaaaagacagaaagacagcaatggcaagagaggggtctcgatatgggatggggcattaggtgagttcctgtgattctggggtactaagattagctgaaaatttcagggagatagattcaaacaacatgtcaacacagtgtgaatgtgttgtgagatgccatcaccaaaggctcagcactactcaggtatagctgtggagatgcaagggagtgtttaggaattttaacaaggagctgaacctgagcgcctttgaggttgcctctagcccagaggcttagtcctcctgtgattgctaaaaagtttgatttccttcacttatagctaacaaagtatccagcaaaacagagctatcagaccaagaaaaagataaagaaaaggaaaaagacaagatccccttcgtattagaaggctctctcaaggtaatccaagacaaatgtcacagatcaatcacaaggccaaaattaccttgtgactgagagtgtgttctagtcacgggacatgatcattttagctaaaacctcagagttgactgaagcctcagtgaaaaaccctgtgtcttcacagctttgccacatgacaagtcttgggggaggggggaaattaatatcttattatttttgcataaccacaccccagggcagtgagtgattgactcatggtcctttactctttacctttgttgaaaatgcttgatttttttcacatatttttatttgaacttcaagttataaaagtagtaagtgcttctgtgaccattcaagattcttttcctgcactatccctgcagttcctgggataagaagtgtcaaagtttgataggttccaattcacacaaacacacacgcacaaatgtacagaggtgttctgttttttcatgttcatgggtctgtccttgtgtgtcaccctcctagaatgtggattcattcaatgatgctgaaccttccatactgtgtggtttagaaacttttatggatttttcattatccaagtacaatcaattattaaatccatctgcagctcctctctcatccttgaaggctgtggagaggggaaggggaaggctgaaggttcccagcttctaacctgggtttgatctttctggtaagcagcgtctaccccattctgaaaccatctaagggtttgccaagagttgcctcattagaacaaaagacagtcctatcactcatggaattccaggggatttgagagctcagtgccaggacccaggaatgaagaccaaatatctggttcttattatatcataatattacagtttctattaaagtcagttgttacttatctgaaaatggctttattttgcccttattcattaagcatagttttatatttatacaattttagttgagtttctcatttcctcacacgactctcaagacatcaatctccctcttctctgctaacatcagagatgttaataaattgtcacattttacatgatttgtagacagtttatcttttctctttagctgctttgaaaacattctgtgatcatctggtaagcatttagcagttgctctctagaaaattgaaaggtgcacataggtacacaaaggtttcagaaaatgtatggatggtaaacttagtatgtaatctgtaaatgataacaaatcttatagtactcttcattgcaaagtccacttagcaaataatacttccatatgctttcactgatttttggtatgttattgtgtcctttggttacagttgacaaacaagtataatcccaccactagtattaataatttgatcaatattttcttttatgttaatgaggcaaaagcaaaattacaaaggggtgtatcccatctatttatcaataatgagcaatttggctgagtcaagaaggagaccctgaatgctgaaaggagagtttctcatctttacgtacagtgtagtggagtagttacatgcccttgagctgaatcgttatttctaacaatctgtcctttgtttttgttgttgttgttttctttgttgttgttgttgttttttagcacagttaatcagtggtcaatctcctagatgtagcactggctaatgtttgttgtgtaaatattccaacaaaaggtgatttcaagctgccagtgtggcactgaaaaaccagagttgggaacagcatggctgtgtgtaccattgtatagtatgtttctcatatacagcacagataataatgaaatctaatacaataagtgtaaatgggtacattttgatcatgtgttggctttgttttaaacattgtacttagttacatttacatgtcttttttgattgtggctttacttagcaactatcacataaaattccctccagccccaaattatcagtaatctctttaaatcaatatgagccaggtttgccacacggctgttactttatgcttagatttattgacctttctgaacattgggatcaatgcctatcatcaccattagcaatgactcagccaatatctgtccaaatacttccttttcagaagtcatagtgtaattctgagaggaaccgtcaagctcctcatttttatacctgtcatttttatagcccttacctatacttgtgatagtttattctctgtattcaagcaaccagaaacttgttttatgactcttacttcataagtcccttatctgcaatcccccatttatactttcaaagtcttggtttagatttttattcaaagtggcttagttccccatgttttgtgatttttgtttgtgagctaacatcaattcagagcttcttctatttgagactatatatccccactgtcttagctcccctccctcagccttccaagtgataaactgcaaggatgtatcagcatgcttggaaactcatgatgtaaaaaaaaatattctgtcaccctttttgaaatattctgtactgggaatgcttctctgggtagtctacctttttgccaaccaagcatattcaggatgtaaattgagaatggaaggaaaggagacaggccacactgctactgtgggccaggtcaaagacaacaaagtctgaaccatgtaaataacatggtaaaaagttggggaagaagctaaaatgaagcgagttcttcaaggaaccccacaggggtgacaaagaactgaggagtgagaaggggacaatgacagagaaccacaagtttcttggcccaatgtttcaaaataccagagacaacacataggaacaccatactaaatttcctcccaaattaacccaaatgtaattcacatttgatctttctcaaaatccctgctaagctgtttgatgtatccccaggcatggaaggaagaacaagagaggttggctgaggaggaacgcctgaaggaggaaaagaaagcagagaagaagggaaaggatacagggaaaaagaaaggcaaggataaggccgacaaagacgatgctaaggctttgaagaaaaagtcttcttccaaggagaagcccaaagaagagccagcaaagacgctggaagtgatagaggaaaccgccccacttccggtaccggaagtcgtttatccggtaagccaactttggaaattctttggattacttctaacacttttagggaaacaagtgttgtttgtttgtttgtttgtttgtttgttttcctgctatctacaaactagatttgaatttctctttctgtctagactcttcttcatagctaaacacccaaatgggaaaacccacaggcctgtttttctgatcatgaaattagactatcaagagctacaaagatggaagtgtgaccgaaagacttacgctttgatattaaaacatgcaaataagcagctgcacaggtcagctcagggagcttgacttgctctatgtacttagacgcctctggtttcgtgctttgactgagccctctctttgctatttctccctcaggtgtctacgtattagaaaaaacagtgaggaaaaaaatggagagaaatgttctgttctattctttgtagctatgactccacccttgttactgtagggttttaagaggaacttgaatccccagcagctataataacaatatctgatgtttaaaaatgtccttgacatacaaccttgtaacacatcaaatgtcaatatttcacttcacttttcaaagaaaattagcaaacgttgtctttcctcatgttatattgatgacagagcatgatttttatctagactggattataagtgctcataaatagtggcatatacctgtaatcacagcctcctagacactgaagcggatgatcatgagtttaagatcagtctcagctactgaataaaaccctgtctttaataatcatgaaaattaataatagcattggatttgggtttctgagcctacaaggtagcaagcaacaacaaaaaaattaagcttatgaaaactgtagttggctaactctagtaagctgattgttgtcaattgcagttccaccccctagtgataatgtgttttcttctagttccgaggatacaatatgggagacatacctatccaaatctcaggaacaaattactatctgtatccttctgatggtgggcagattgaagtggaaaagaccaggtttgaacgaggtacattagcaagagctgttaatgtcatggggagggggaatgttaatgcatttccaatatcatggggcattgtgcctctgagtgtggagggtggcaactaactgcacccacattcacaccacatcgcattctcaggatcaagtgcttctatcgttattgagtctgcaagggatcaaccaactcagaatttactcagacattggtgataggagcatcctaattgttgaaaatatttaaatgcttctacattatcagtcaatggcatattagcaactgtaataagcaaatagttaatcaagttctactgattacaacacaccatcatgtcagaaagcaaacatatgctttgagtttatagtgtggttctggctcatgctccacagtacagtgctcagggacctctgctgctggtatgctagctcttaccaagacttgcatatgtgaacagtttatataaagttcagatggttcatagaaaatacagtattttcatcttaatcctatcaattttgagagacactaccaccatagttgaaaatgaaaggctggatttaaaagggagataaaagagaggtgggggagtctgaacactgttaagagagaatggattagtagaaaagtgcttacaacctgcatagtgatagtaatagtaattgtggaaggcacacacacatgcattaaatatatataattatgactgtcattatagtgccatagtcgtcaagtatagtaatacacatttgaaatatcaacatacatgaggctaaggcagaagaatcataaatttgagggtgttctgatatacacacacatacacacataattatatgcattatatattattgtatataaatactgttaaaactttgcatgttaattagctcatttgatatatcggagttgaatgtatgtgttcaccctttcagaccatgtattttgtctctgtgatttggtttgggatgtgacaagaaggcctgcaaaccctccttgtccatgcttccttttggcatccctgtatagagttggtacggcagctgctgtctaattctgttctgcattccactagcattttgtcaaggtgtgtgtgtggcatcttcagtcagcccactttctatcctttgattcttcctcagggtcaactttcatcaaagtcaaagtaaaaaaagataaacacaattttataattcacctgaaagacccaaaggaaattgtaaaaaggaaaaggaagagaagaactcagaagaggaggaggaggaggaannnnnnnnnnnnnnnnnnnnnnnnnnnnnnnnnnnnnnnnnnnnnnnnnnnnnnnnnnnnnnnnnnnnnnnnnnnnnnnnnnnnnnggggaagaggaaaaggttaaacagaaagtggaaatgagtgagtgtctttgcctttgtggtgctgggctctggtaagtaagcagtgatgtgggtcagcccagctctggacagaactgcacacgcatcctttgtactcaacccgtgtggattttacaggtgcggcctggagcagttgctctctacttgtgttcatctttcccaacacactgagcatggatgctgcatgcctggtgcccctgcaggtggctgttaactgaatcttgctgccaccctacagaatctcttgttttcatagccatagcaagaggccaggccagtcagactgatgtgacaacccagtgcacactgtccactctgacattcatggtttatgcagactcgaactcaggcccttttgaattgatccctaccaagacttgcaagttccttaagtgtaagcaatggggtttccttcaagtgttcctcacttagtttgtttcattgtaccaatctctgagcttcaaagatgaggttttaaaaaatcacagatttagtcgtgagtgtattacttaagtagaaacaagaagtgcaatggctgcccacttgcacttcgaggcaacaccccctggagaaactgtttcttatccaagctcatagccatacaagagaacaagttaatttttaagatgttttcaaatccagttagttatgggatcactaagtcttgcctatatgtttagttatactgatactttctatagccaagaacacaatgcttgacaatttgaatgtacctaggaaggaagcatagaaaaatgttacttttaattaattttctttgttcagctaataaaaaagtattaattggggctgaggaaaaagcttagttggtaaagtatttgctgtaatcatgaggactcaagctcaggactctagcacccacataaaaggccaagtgcttgtgtacacagctggaatccagccctgggcagtggacatgacaggatcctatcgctcactgacaagcagtctaacctaagcagtgagagacacagtctcaaaagtcagagcagagagcaatagaagacaacacctaagatctacctctggcctccacagatgcatgtctgtgtgtgtgtgtgtgtgtgtgtgtgtgtgtgtgtgtgtgtgtgtgtgtgtgtgtgtgtttgcatgcctgtatgtgtgcatctcactagggactgaacctagggtcttaagtatgctagaaaatactctaaaactgagtaatgttcctctgttctcagcccatttcatttcttcttctcactacatagtatgtggttatctgggtaggttggcttatctattctccaactgaaggacatcttgcttgtctccaagtttggctaaataaggatggttagtgcatagttttttgtgtgggcatacatttttaagtactatgagtaagtagcaaggagcatggttgctgggtcatacggtacagtggagcaatgcccataaggaggcagcaaactgcctttcagcgatgaatgagagttttgctgctcccgtgctcctagccttctgtgtcctccatgcttcgggttttctccattctgacaggtgcctcttttcactcattgttttcatctgcatttccctggtgacgtataacatcaaactgcttctcataggcttatttttgatctgtgtatcttctttggttaggttctgtagaggggctttgagctgtttctcctttggcttgctttcttattactggtcattaggagtcttcctatgtttcctgtaacagctctttgtcagagtgtcttaagcaaacattgactctcagattgtgaattgttttctttctcatgaagcattgttctttttatttgatgtcccattgagcattcaaatattcccagtcaggaaataatctgctcataggttagagtattttaggctgacaccgtcccatttttattatatgatgatggaatgggtaataaaagggaagtgagagagcaggatggaccacttgagaccctccacacgtgacccataaatgtgcgtttttaacacattttctttttaaaacctatgctttagtcaaaccattttcaattgtgtttgaaaatataaggcattataaatgtagggatttaataaagtgtttttaaatgtgaagaaacttggaatgacttggtgattttcatttgaaaagtaatgtgaatggtccacagatcgataaccagcatatggccaagccattcactggtttatatcctctctgcattttgacctaaagtcctttaaacgagaatctcatgttccatccctgaaactctgcctcacttccctgtgtccttggtcaaagccaagtcaattacttttaaatcgatggtattagaacagcttagatgcccgcccccagcattcccactgaattctgcttacacttctggagaaaatggaaatatccatgatatgattttatcttttagaaagagcacagatagagaaggaagctgtcagcaagtttggatctttttctgccaccttggaaaatggaatctgcctctcgataagttactatggatcaaatggaatggcaccaggtaagaaacacacaacagaataaatgtcccatgatgggcagtccttgcccttccccagcttgtacatttatcagaaataaacctcttctgatttaatgcttcacatatagtttttcctgcaacatagagatatgtggggtatggggtatatgtatgtgtgtctgtgtttatctgtgtctgtgtgtatgtatatgtgtgtaggtatatacatgaagataattttcctttacatcaagagcaatgccttcactttcaaatttcttttatcaattgtgtaatcttttacataatcacatgtacacacatatgtatattttgattattaattagtccatgaaagtaattctgttacattggtacaaggaaagcatgatcttccagagagttctcatgggtttctacagaacaatatttttatgagtcctatgatagtagaactactcagtgtacttcaggatgttggtttaaaaggagccattcattggacatattagaggatttctgggctccactttcaagaaacaaattccccaactggaagctatttcctttcaaaccacaaaatactatgttgctttaccaagaaccaattaagaaatatgtggatccccacaaactttaaagggatccaaccacagtagacattttttaaacattgcaaaatcaatagataatccctatgccatatagttttaaaactgtgtgctagcagagattatggtgatcatcttacctcctgactatgtagctcctttgctgcagaccaccatgaattctcataacattgtttcttaaaagttgaaatatctctagaaccacaccaagaggtgtctaaaagcagaaatacagatctggaactgagaagggaaaatcatgcctactgtggccattgtagagtcaacacatagataatatttgaacccctaattgcgaataagatcgttacatctaatatatgcacagaccaaactatatataacgatcacatacggtgttgcatacatgtgcctatctggacttctgcccctgtaaaacagattcagtaagtcagggagacttgggcatctgtttaattccctgagtaattattatggtagccaaacttgagaacatagtgtaacctgagacctggaagcatcttcaagacttaaaatggagaagggggggggtgaccagaaaggtcaggagaggtcaaagaagaggtataatggatcctgcaggagaacagatgacaagataaaaggggcacatgcttgcacatgcacacgcatgcacgcgcacagtgttgcctgtcatcagccctttagaatttccaaacttttaaaacccaaaagtcaatagatagcctacaagaaagctacttatctcaccttagataaaactagtgtttgtcttcactggatctctttatctatattgcttgtgtctaaggtatcctcatgatccactctctcagtgcccgacttgctgttatgaatctaggaccttccagatgtttaatgagttccattgctcaaattaaaagaaaaagggaaagttagtagagcgtacaacagactggagggaaaggatatgtgagacaaggaacgtgagattaattattgtatcaaccacactaaaaggttaaacactttaaattttttaactacaatctgattttcaaaacaactacattatctctggaatatatccaactggaaaaacatgtttcacatagtgggagttaatgccaacttgaacaaattttttgagatgtatcgattaacaagcatatgaaatatgaatatttaattttccattctccccttttttcctatttctagaggttataaattctgagttggaagcaatgatgaatattccttcagctatgacagcaacagtggttcctgctgtagtgactgttccccaaggcaaagggaaagctaagccgaaaggcaaagaaaaacacaaagattccattaaagaagaggaacttccaaaagaagaagagaagaaggtaggtgaacatggctacaggtttccaatcttttcaccccaatgttacttttatgattaaaatgcaattacactgtttctcccactccctttcctttctctaccttctccaaaatctcttctcaacatctctctctctctcaaattcctggtctactcttcttcattattgtcacacaggcacaccagatcacacacacacatacacatcacatcacacacacatcaacacacaccacacacacatatctcacacatcacacacacacacacatcaacacacgtaacacacacaagtttcacacacacacacaccagtagggttgctggtttccccaacattgccttaatctcttttaactactatcacaaaatatcttaaagtacatgaatcacaaacaacaaaagtcaattggtcaaattgagactggtaagtccaagagtgggttctgggtaactctatgtctcatgtgagcaagttgctgtagacagcaccttctgtgttcctttatatcacagaaagagtaaactctgttcactaggtacctttttataaaggcctgaatcacagtcatgaaaaccaagccctcagaattctcagttccctaacggcctacttgataccatcatgttgggtatcaagttccaccatctgagtctggggtggggaaaccaacacctgaaccatagtgttgtccacatcccatacatccaaataggggcaccattcacattccactccagtccatttgctcaacagatgcattcacagtgacctctgttaactttggtgtcttcttctctcagggaaaatgtgatgtttgatactgtgtcttgtcacatgtcaaaattctggaatccttttagaatccattgcagagtctacctacttactcacaagttatattgtttgacaaatccttgcttgatcgaaataaatgtgtcgccttcagagaatgacaagcatttacttatatacagaatcacatacaggaagaagtagaaccagagatcgttatacaggaatcaccaccctatgtacccaccttccaaaacttaaatgtatcttgccccagtgggctcctgctgaccttcattgggcaagaatctacaggtgagtgttaactggagtggacaaggaatcatgggtcaaaaactaacacagaaaaccccaccattgaaagtgtgtcttggccctggcattcccctgtactgggacatggggaatgctagggccaagaagcaggagtgggtgggtaggggagcagggtggagggagggtatagggaactttcaggatagcatttgaaatgtatatgaagaaaatatctaataaaaaaaagaaagaaagtgtatcttgtcaggcggtggtgacgcacacctttaatcccagcacttgggaggcagaggcaggcagatttctgagtttgaggccagcctggtctacaaagtgagttccaggacagccagagctacacagagaaaccccgtctcaaaaaaaaaacaaaacaaaacaaaaaaagaaagtgtgtcttttcttaccaggtgtacttattgatgatgagcaatgggtaattttcaagtaatgatcagaacactaatgaccattctcaagcacttgctgtgatgaaccattgtcaacgtcctgtacatgcatgtaaaaacacaaatcttacaagagtaggtactgataattccatcttataaaatacagactctgagatttctggaggtgcaacaatgtgcgcaaggtcacctgactggtaaaaggcagagttaggaagccattcttgacaaatggtattgcatcaacttaaaaaagccatcccatagtactttgctatttagaaggtatttattgagtgcttttgctcttgattgccagtgagcagcagaatactgagagatgtctggctatggtgaaagatgggggtttgggttaattttgaaggatgatgggtaagttagagaaggtttgaatgtgaggctccctgaagttcaaagaaagcaggggataccagagcaatgtctaccatggagcaagagcttactcagaatggcatgccaagagagaaaatggagtccctaagacactgaaattctgctcccaaatcatttggccttgacatgctctggactttagtgtatgcaaatgctctaagaaggattttactatttgttatgttgtgaaaatgtccttactcactacgtttgaatgaaaaaggtcatcaaagacgcagtgtgctgagccatctgtcatgaatgaaaggaaacttccctagttctcaaacacagacaaaagaataaaaacaaaacaaaacaaacaaataaaaaagaagataaaaatcccagccctgtagcaccattcaccccaccaatagctttcctctcttttgatttttaagattattccatcgtagatgaagaacccacccggaacctcatgattcgccagagctacccccagcggttgaagcactatgagttctataaagcagtgatgccacccctggagcaggaggcatcaagagttgtcaccagccagggcaccgttatcaagtatatgctggatggatccacacaggttaaagactatagtatttaaatagcctccctcacagtgaagtgcaagacagctggactttaagtaaggagcaaggctactgcacggaggagacatacacaaagcacaagggtgcattaaagtggcaagtgaaaaggagtgcagttggaggcactgcagtgaagttaggctgtccctgaaagccagagtgcatacaatagagatggtgttccttctatatgatctataagactgcagactccatatgctttcctctttttccctcaactcatcttaaagcaggaggatggaaagctcttaaatactcaattcccaacagtgctaggagacaacgaaatacatcattagtgtaagaagtgtttaaaaaattgctagaagatgcaaggtggttagggtcagactgatagagatataaggacaaagtttaaaatatgtacaattgaaaaaaactctaaaattaaggaggattttgaatagaaaggtgtacgtctaagagctgaaaatcagggtagttctgcaggtaaactcattttgtagagacttaaaaatcagaagctatgaaacccagaaactgcatgcctttgcccaccttcaaaaatgatcagagagaaaggcttctataattagacaatatactaccaagagccatgagggtttcaagactatgtatctaagaaaatcaacaacagattcaatattgttaaaaatcacctaacagtaaatacttgaacatacattttaaatgggtaaaactgatatagacagagactcaagttaacaataattttaaggaaaatttaacttccgtgacaacagcaagatagctcagtgggtcaaggcgcttacctgattatcaagcctgattactgagtttgatctccaaaattcaaatggtggaaggagggaagagactctggagagttgacatctgatcttcatatctgtcatgatgtgcacacatacatacatgcctgaatatatgtgtacatacatacatacatacatacatacacacatacatatagaaaagctgatgtctgatcttcatatatctgccatgatacacacaaatgcgtgtaccgcgagtgcacatacacagagagagagagagagagagaggagagagagaaatggatggatagatagatagatagatagatagatagaatgaaatttaaaataagtataaactgctgtgaaaaaaaatcaaaagttcttcaaattttaaagtaattgtgaaaagccaagtggtaggaggggtgacgtagagagaaaagagctaagaggtgtggaaatgctccatatgccctagcatttctggaagaaaacaatgagaatgggaggagaatgtagtttagacaatagtgtgtgaaacatatttcagattcatcctggccaagtgccaatctgggatgatgctaatttatctttaagtgtcatcttgctacctaggactgcacaggtagcctgcaaagcttctgaagagcccaggaagaatcaggtcagagtcacagggacagctgacttccttaccatactccctgggaggctgtgcacatgggtacccatggagtatctatgatacctagagatggcatgcgtccttggtagatggtaatggaaatgagacatttaaaatataatacatttgaaaatgtggctgttgtagaattcttatctatacgattttccaattatatagaataaggataaagaatagaaaagtatattaatccaacaatggttgtgaaatagaagcaagacagatataggtagaaaatatgaattcatagttattgctgtatgcaggtgcaaatcaaccctctaatggcactttctggcacccacatgaaggtctgccttcagccgtcctgcagattattttgagccccaaacatgcagggtacagcactctttgaggaccagcctcctcttgacttctgagaattctgagaccttgtttttccttcagattctctttgcagatggtgctgtgagcagcagccctgattcgggtcctgtttacacatctcctgaattgcctacaagcccccataatggagatttggtggacagtgcctctcagcccaaatcagaaacaggacctgagatcatcattactaagaaaggtaaccatctaagtatcttactctgcaggatttacagttttcaaatgcttcacagctgttccctgttatgatgctgtgcatcgttttattatatacatacctattcatgtacaaatacacactcatatgtatatgctaattttctttaccaacacgggattgcttactagctcatgaactgccttcttccactttgtggaataaataacacacattttcccatgcataatgaacagtttcctatgtcattgtacccacttacacattagctatactatctggggttgtgttttaggggtttgttaactaagtaataaaagattcgagtcagcatccctgggaagctgttgaccttctcttcaagttgagacaggacccctcggatgcacccaggggcttccatttatcagcttccaaaccagaaaagaaaaagaagtgcattcaagagtgtgtgttctcaggagattcctgaccccaaccctaaccttcctccctttggatctcaagggctacacctgcatgggtttcagtgctgccaaaacaaagagccgatattttgtgccttttttcatctgatttgtggagtgtaaggggtgttcaggagcagacagtggcatctgcaataattgaaagcaaagattgctgctctgaagatttctgtttatactcctcccactagcacaatatacgaaaggatactttcacacactcatgacaataccaaatattattctctaagtgtcaatcagtttggttagtgaaccttgttactatttgactaatagtgagattaataagttgagtggtaattgagtttagttcatagtagctttcacaggaataattatattttagttttaatactatctcttccactgtaattctgaaattttttgaattgttttaatctccttctacattctacattctacattcattttcaagtctctataatgttcctagtttattttaatcactgattcttaactgttgaaatacaatttttaatcttatgcatgatcaataattcaaacctatgcttgaaaacagcacacatcccgtagttattcggtacagtgttctctttatacttattatatgaaacttgttagttgtgtttcccagatgtgcctgaggtcagcatccttttctgtaaagggcaagatggtaaatcttatagccttggcaggccatgtgttctctgtccctgtaactcagcaattctgctggagcaggagagtgctttttggtaattcataattcaataagcctcaaatatgctgtgtcccaataaaaactatttatgaacattaaaattggaatttgatactgttttcatgcatcataaactacttttaaattcctattagctgcttagaaatacgaggtgtcgttacttcacagacaacacagaacaggctgcaagccttccttatagatagaacgcccagtccttacctcccatccttgcatgcttcttgtccccgacctgatttattcagccacatgtaagttgaccaacaggtgagcagtgctgctcagcactgtgctccttgtactcctccttgcttcttgtgtaagataaatttgtttctttaatggttctgtcaaattttccttcagatagtttgatagtataattgtaaatacagctttagagttattctttgtggtgagtttaccttgtcattgttttacagggttttttttttttttttaattgtgagacttctctcccctaatgtttctttgcttagattgctgtgtctctcctaaccacggttctaagtaacctcgcgggtatgacttttccactctcatagtcctctgtagcatgtgcctaaatgtgtctcttatatacagcgtataggtagatgtcgtcaaagctaagtttgaaaggtcttgtttatagagattttaattcattcatcgaacagttgacatttcctgaaaatctccttatattgtgcttattctcaaatggcaatttcactgagtgtgaaattctaaattgatgcacactgacagtgttttagatatactcatgttttaaagatagctgttagtccaattcctgctactttaaatatcattcatcctcagatcattccccatttttttaaaatagtttcaatacaattacacttggtttacttatacaaatagtagtgcattaggcactttaatctgtagataagtgtatctcactgatgctgaaaatgtctcaataattatctcttcaaatatttccattaatttccttttcctctatttttgtaattctcataaaacagaagcctttgacttcttccctttttactgaggattgcaacattcagtttcagtctaaataattgactcaagtctatctttgagctctcctctaacgtacattatatcttctataaaacctcatattaatttgtttaaatttcagatgttacgtttttccacatctacttcccttatgttcaatctgtcttctctgtttttttattaaatttttaaaattaaaatataattacatcacttccccttctgattcctttcaaccccttcttcccctacatccctctcaaattgatggtgtctagtcctttgattattgttgatatattatatgtaagtgcataaatatgtacatacaccttgatccatttaatatggctaacatatgtatatgatatgtagatgattgcaggactgaccggttgttattgaacagccagtgagagtcctcagcctcggaggagaccgttttccctcacacagcagtcagttgttttctgtagttctttatctaggggtagggacccacagttcccagttattctttctattgctagtatcattgttcagctcccgttcagacagccatacagataaggtatcataagtgtgatatttgtcttttctaggagacagaatccagacttagcagacgtctctgttttctgtctcttataggcttgctatctcctcctctacaatgtgttctgtgccgtaagtgcatgagttgtgttgtcagatgtatacactggggctagactccccacaacctaataatcactgtgttatgacctgttgtagttttctgtaatggtctctctgctataaagagaagcttctttggcatcgggtgagagccacacttactgtgggtaaacaataagctttagaacggaattaggaattatgttggtctagtaaagtagtggtagtagggtcttttctaagattcatgacttcactagtccctgataactggctatgtttctagtattaagcatgattctcctcctattgagtgagacttaagttcaatgtcacagccattggttaccatcaggatgtgagtgacactattgtacctttaggtattgctagttacgttggtcgttgttgtagttcatgggcattgcagataggcaggactactgactgcttccctccctgggcagcttctgtaataatttttggtaatatgaaaactagatcacagaaaggaagcttctgagttatatccagctcaaaccttccaagtcctgtatgggaagtgtacagtggcttcagaaataggtgggaccttacctgcataaaatgtataggaaagtggatggagctagaagatactgagtaaggtaacccagacacagaaaagccagaggagaggaggagaactagagaggacatagcaggatacagcggatgtaaagaggaaaatgagaaaaacagggaggaggacccattggtgagtggacaaggaggtcaacacagaggaaagaggagggagaatgcacaataatatcaagcaaggatgtcgtattattttatagttaccgcaaatcatatgattttttaataaaattatgccacttgggatgacagtgctccccacaagagcaatgtgttatctaacaaatcccccagggccaagcatgagaatcctccattggagttcttggtcaggattgtccaagtaacttccaaataatgcaggctatttctgtagccccctgctgtttctcagaggttggaggtaacctgcctcctctccactcacacttaaaactggctccttcacaccaggaatctcacccttcagactctgcacctattcagttggtgcctctgactcccccttggaagtgcttgtgccttgttgctttttgattattgcatgatcatttttatttcttgttgctttaactctaaatgctttggatcaatgcaaatatagatacatttctttgaaaacagtttgtttcaggaagaaaaatatcatggatctgatattaaccctattattaaattattattctgagggggtttcggaatgtcacctaagcaatggtcattctcacgtgaagactcacatgcttgctacttgtgatcacataccacagatatttttgcttcctctgctcagccccagattgaacactgacctcttgtcccgtagtgctggggtatatggcagcagaaagcatgcatttattttgtgattagttcacactttctgagaacagttcttcacagtctcaagcttctgggggtgtctcatatttaactccttgaaccatcgtgagtgagttctgaattttgttctttccttagtcccatgccaccccagtttgagaaggccacttcacagggccaagctgtgttcaattcaagcttgacttccttgtgtccctgcctctacttgggccttggctagtgctgactacatccttcacttattacgtcagagacacttccaaataacaaaactgtactggcatttttttgttattttctgtggaattcttgatgacgagttggtgatgttgctggaatggaacatgaactgtacctaatgcttatgtctgatcactgccgtcttcatcactttatctatctgtgcccataataaaggacgagagtagttacataagagttcagagcatgcacatgatcctctcagtgcgctcttccacctctcgtcctttcacacttatatactcccatgtccattggcactaatatcatacttatctgttctactgctgcctgcaatctctgctacactaatactttctaactgttgctcatgctttctttatgactaatttcctatattcctgccaaaagcacccaactcatcttttgagaacttcactgtccctcttaaatatttcctgtaggagatcttaagatctataacaggccataaagatacattttactggacccgtgcctccctttccagtttctcctctcaataaaaatgtatcctctgactaaaaaagtacgcattggtgtctgcacacaccatgctgtgcaccaccaccaccaccacccacatatcccctgccctgattctgttatctttctaggatcctcatgttggcatgacttttccacttctggtgatgagaaaacaagagagaatgagacaggggaagagaggaaagaaaagaagagaaaaaaagacaccacaccaaatatttactccctcctgtgggggatctatacacattgtgcatctggcaccatgctcctctctgacgctcatctggtagtgctaacaagtcacaaacaaatcctgaggcaactggaggcgagaattcactgcaagtctcttcttcagttctgcccagtttttgagtccctgtgcattggactgagatctgtagtctgacatatgagcattttgtgctctgaatctagaaactcttaacaatcctttactttctgctcataattggtttctgagtttacctcatcagcgaggcctggtgacacatgtgtcccccagatgctgagaaggatggaagaggaatacgcatctgatggatgttgatgtggtgttcagctgtacaaagtcacttctgctgatgagaagccaaggatttgcttggctagttagggccctcggattcagaatgaactaaatagaggagattaaatgtttcaaaggctgtagtggatagatttcatatgccagagaagagtgacatacccagaagtggaatatagcccacacgagatctgggattcacagacaaataaggaagattaaaactgttcagaaaaaaacacaatggcttccattcaccaaacagtgagctgcacataggtgtgtatgcctggaagaaggtaatggcaattcagctaaggttcagtccccaaactgacctatttacctatttacccgactttccctgttaagaagtaatataattggtgactattgctttcgcgtgtctacgtgtctaaagaggttcctactgtgttaggacttaatgagcagtctgtgaaagtgttctagttacactgcaatggctaattgtccttgatcatccacagggaaaggtcacaaaaatcaaacagtggcaaataagagtgaaacccatgatattatcccagaggtacctccaccaactcccgtagagtcccacattggcacctggtttaccacaacacctgatggaaggaggattggcaccaaaggactagagaaaattgaggacttgaaaccatatttgttcttccaggctacagatcccatcaatggaacggtatgacaaagtggtgcatatcacaaaaatacctaaaccattagagtcccgaaacacatagaagaatatgtacaaatctcaacttccaaatatttgttaggcagtaggtgggtgggttggtgggaaggtaggtaggtaggtaagtaggtaagtgggtgtgtgggtaggtggatggatggatggatggatggatggacccacctaaaatcactgtgtggtttagtagcaagcatactgttttctgaagagtgtgtgtgtgtgtgtgtgtgtgtgtgtgtgtgtgtgtgcgtgtgtgtgtgtgtattttgtatgtgtgtacatgaaatcatgttagaataaactatgaatttttgaagtgagggttatgaatttttgttctttttctttcatttatttaagtgattaatttgttgttgctggtggtgatggtggtggtggtggtggtggtggtggtggtggtggtggtggtggtggtatcgttgagacagtcttgctgcatagcccaagctggcttgaactcctgcattagcctctgtagtacactgcaatgctgaatagctcgtgaattgtttatactacctaagcatagctgtgactaatgtcacctatctccttgtgttaaatatatctgtatatctgttttatctctgggaatgagaggctatatgttcttgtcctgcttctttgtggccctctgtactgagtggtcaaaactggttcaggatctatgctttcaaaaaatcacactcacattaaataacttaaaaactcaacatcagtgagcacaggggattttatttgaccacaatagggagtggtaaacaactgttattttaaaagtagtggtttggtttatgacatgaaatcactcccctgccatgagccatgcaccttgcacatgccaggcttcctctggggtgttttgtctactttagtcctcatagaactatagattatttattacatgatgacaaaacagagcccagcaagttgaccactcaataactcactcgaaggaagtgtttggcgccaggatttccaatctactcttagtgactgagagctgcgctccttctaacatttagttatccccctccccaacagtgtgtgtggaactctgtggcaccccctaaacccaaacaaaatgaagtattttctaggtgcctcgtctctgctttacaaacacactgctggtaacaaatgtctgccttctcttagcagattccatgatctaacctacacatcctctccccacttcatcagctatttgcagaataacttcacaatctttgaccttgctatttgtct

SEQ ID NO: 809 - DNA, 3625 bp, Mus musculus
cagagacgctcaggcctggcctcagcccagttttgaggccaatgaacctcccatccttcgcatggcacccaagaaggagaaacctaccgggagcgcaaactataagatatgggaaccttccctcatagctgcacacttgaaccagaatgattggaaggcctccatcgccttcgtggttgggaaccgagttgaggatgatcttctcattcatgcccttgacctggctgttcgactccctcagcggaaactcttcagtattgtgtcatgggaagacattctgcagcagatggatgaaatacagtcacttgctgaaagtgcttcagctaaaaaggggaaaaagcccacatctgtcaatttaccgttacattacgaggtgttcctggcagcaaagataatcatggagagtggagagaaactaaccttaccattgatagggaaactcttgaagtgtcaacttctccatattaaatccaaggaccagcagagacgagaaaatgaaaagaagatggtagaagaaagaacaaaatcagaaaaagacaaaggaaaagggaagtctccaaaggagaagaaagttgccagtgccaagcctgggaagggaaagagcaaggaccagcctgaggccactgtaacagtgaggaagaccacacagttaaaacggaggggagaagatgacgaggccaaatcctatatcgatgatgagccagacgatggtgcccaatattacattattgttgtgggcttcaacaatcctcagctattggccattatgactgagcttggcattcctataaccagtgtgattaaaatatcttcagagaactatgaacctctacagacacacctggcagcagtcaggcagcaacaggaagctgtccttcagccagaagatatagaagctgaaaaattgaagagaaaaaattccatcaaggaacttgaggttttctggaagtacttggaaccaatcctgaataatgagaaacttgaaatacatctctttgatgttgctcgtctccagtacatggtcaaggcaacatattttccttctgattggtcagacaatgaacagatgcttgcattgggcaccgagatctttgaaaacattgcctgtttgatgtacgatagcctggactggaagaggcaacatcatcactatttgcaaagcatgcagctcatcaatgtcccacaggtggtcagtgagaagaccgtgctagaggcaatcacaatcccagagcctccaccatcaactgctccagcccccactgggaagaagaaagcacagtatgaggagtcgcatgctccaccaacaggcataatttcaggaagaactagagaacgcatcttaactgggcaatgtcactttctgcatttgacagtggcttttatcatcacaactgaagtagacatgcggtattacaatgacctgctgaatccaattccagaggaatttatttctgtgtccttgatactgcactgcatggtggaacaggttgtagcaactgaagaagatctcatcccgccaagtttggtggagccagcccccagagcagacgggttagactacagaatcgcagctcacattgtgtcgatcctgccttcactctgcctctccgaaaaggaaaagaagaatcttcgtgagatattcttaactgaaggagagagtgaaagcaaagccctgcccaaaggtcccctcctactgaactaccacgatgcgcatgcccacaagaagtatgcactgaaggaccaaaagaattttgacccggttcaagttgagcaggagatgcagtccaagctgccactgtgggaattccttcagttccctctcccccctccatggaacagcactaaacgactcgccactattcacgagcttatgcatttctgtacgaacgaagttctgagctggaatgaagtagaacgagccttcaaggtatttacttttgagagcctgaagctctcagaggtggatgaggaagggaggctcaagcccacagaaacgaccagtgacacagatgttgaaaatttcaacattccttgggacaatcctgccaggttcgctaagctgataaggcagcggtacattcacaggatgagcatgcagaaggccccgccagtagtagtagagattgaaaacactgagagaacactatttgtgaacaagaattttgccaaagctgagcaagatgcacaaggagatgaaaattccccaaattctgacgagcctgatgctattagtgtgacgggttctacttccaactccacaaaaccctggaattctagtaatagacagttctcagaaaaagagaccagtgggtccatgtggccccagccagagtccatggatcagaccatggacactgagatcaaagatgacgcagccacaaaggatgattctcctgaaaaagttcttcaggaggctcaccagcaataccgatgtgttgactcttactaccacacgcaggataactctttacttctggtttttcataatccaatgaatctacagcgtctgcaatgtgaacattggaatattgctcttcactccaacgtcggattcaggaattacttagaacttgttgcaaaatctattgaagactgggtcacacaggaagaagcgaagtaccaggaagccaaaatggctgaggagctcaacaggatcaggattgagttggaactgaaagccactgtcaaaacttctgctagcaaaattcctggccccaaaagatctaaaactaacaaagtatccagcaaaacagagctatcagaccaagaaaaagataaagaaaaggaaaaagacaagatccccttcgtattagaaggctctctcaaggagaagcccaaagaagagccagcaaagacgctggaagtgatagaggaaaccgccccacttccggtaccggaagtcgtttatccgttccgaggatacaatatgggagacatacctatccaaatctcaggaacaaattactatctgtatccttctgatggtgggcagattgaagtggaaaagaccaggtttgaacgagaaagagcacagatagagaaggaagctgtcagcaagtttggatctttttctgccaccttggaaaatggaatctgcctctcgataagttactatggatcaaatggaatggcaccagaggttataaattctgagttggaagcaatgatgaatattccttcagctatgacagcaacagtggttcctgctgtagtgactgttccccaaggcaaagggaaagctaagccgaaaggcaaagaaaaacacaaagattccattaaagaagaggaacttccaaaagaagaagagaagaagaatcacatacaggaagaagtagaaccagagatcgttatacaggaatcaccaccctatgtacccaccttccaaaacttaaatgtatcttgccccagtgggctcctgctgaccttcattgggcaagaatctacagattattccatcgtagatgaagaacccacccggaacctcatgattcgccagagctacccccagcggttgaagcactatgagttctataaagcagtgatgccacccctggagcaggaggcatcaagagttgtcaccagccagggcaccgttatcaagtatatgctggatggatccacacag

SEQ ID NO: 810 - protein, 1208 aa, Mus musculus
RDAQAWPQPSFEANEPPILRMAPKKEKPTGSANYKIWEPSLIAAHLNQNDWKASIAFVVGNRVEDDLLIHALDLAVRLPQRKLFSIVSWEDILQQMDEIQSLAESASAKKGKKPTSVNLPLHYEVFLAAKIIMESGEKLTLPLIGKLLKCQLLHIKSKDQQRRENEKKMVEERTKSEKDKGKGKSPKEKKVASAKPGKGKSKDQPEATVTVRKTTQLKRRGEDDEAKSYIDDEPDDGAQYYIIVVGFNNPQLLAIMTELGIPITSVIKISSENYEPLQTHLAAVRQQQEAVLQPEDIEAEKLKRKNSIKELEVFWKYLEPILNNEKLEIHLFDVARLQYMVKATYFPSDWSDNEQMLALGTEIFENIACLMYDSLDWKRQHHHYLQSMQLINVPQVVSEKTVLEAITIPEPPPSTAPAPTGKKKAQYEESHAPPTGIISGRTRERILTGQCHFLHLTVAFIITTEVDMRYYNDLLNPIPEEFISVSLILHCMVEQVVATEEDLIPPSLVEPAPRADGLDYRIAAHIVSILPSLCLSEKEKKNLREIFLTEGESESKALPKGPLLLNYHDAHAHKKYALKDQKNFDPVQVEQEMQSKLPLWEFLQFPLPPPWNSTKRLATIHELMHFCTNEVLSWNEVERAFKVFTFESLKLSEVDEEGRLKPTETTSDTDVENFNIPWDNPARFAKLIRQRYIHRMSMQKAPPVVVEIENTERTLFVNKNFAKAEQDAQGDENSPNSDEPDAISVTGSTSNSTKPWNSSNRQFSEKETSGSMWPQPESMDQTMDTEIKDDAATKDDSPEKVLQEAHQQYRCVDSYYHTQDNSLLLVFHNPMNLQRLQCEHWNIALHSNVGFRNYLELVAKSIEDWVTQEEAKYQEAKMAEELNRIRIELELKATVKTSASKIPGPKRSKTNKVSSKTELSDQEKDKEKEKDKIPFVLEGSLKEKPKEEPAKTLEVIEETAPLPVPEVVYPFRGYNMGDIPIQISGTNYYLYPSDGGQIEVEKTRFERERAQIEKEAVSKFGSFSATLENGICLSISYYGSNGMAPEVINSELEAMMNIPSAMTATVVPAVVTVPQGKGKAKPKGKEKHKDSIKEEELPKEEEKKNHIQEEVEPEIVIQESPPYVPTFQNLNVSCPSGLLLTFIGQESTDYSIVDEEPTRNLMIRQSYPQRLKHYEFYKAVMPPLEQEASRVVTSQGTVIKYMLDGSTQ

SEQ ID NO: 811 - DNA, 96861 bp, Homo sapiens
ccctggatatgccccactcaagatggatgtagaaattaaattatatccatggctttgtagtaaacaagggataaatgaagacgcttgtattcactgtaagaaaataagttgtccatgagattgaattaaccaagcaacagcatggatggctcatgagaatgagtattggtcggttattttgtttcttctgggtagccctagtgccaaggcacaacaaatccatgaaacatacacaaagcttaatgtataaatgacatttacaatacaggaaggaagatagaaaaacaaagcaaaagggctgcagtagagtaagtaatgagctaacattaagtcttaaaaatatatcttattttttaatgtggaagatagtgatgcaacattgaaggaactcaatcaaggtcaaagaaggtctcgtgcttgaggaaggagttgatgaaaggttgtagcttttaatatatgatgatgaaaagagatctccttttagggcgggtgagtctctgattccagttttacatttctggagcaattagcaggactcctcttggcttttcttggtctcctctgttagaagaatgtctctgatatgtaatatttgtttcaaaacccaaagaagctcgtttccttttgaggtttgccttactttttatgttctgaagttcattttgaacctcagattttgctccaagccataaaactggttggattgtactaacataatggagccgtaatttcagcccactgttgggggtggggagatagttaaggtgtgtagtggctctgtggtttctctgtggagtagaattccctgcaaagcttttccatgtggtgttttaatagctgtcttaaaactctctgatgcatggagcaaaaccgaattaagctcatgtgctagattggtgggatgggccaagaactctgtgaaaaacgaaagaaaaacaatcaaacagcctaagccagaggctacatggtacaaagaagatccccaggacatatctaaattcaaaattcaaaattactgcagcagtcacctcttttaacccatttttgcagaactttctacaggaaattagaatatttcccttgcatatattaatattttacatttatgtggtactcaacaaatttacaaaaggaccctaagtgtattcattcttgggtcctgcaatagtcttttgaaagttgtattaatagattcataattttaaatgagaaactgagtcacaaagataagcccaaggtcatttggctaagaaaccacagaggcagaatttgacactacccaaacctctctgcatacctacaccagaacttcaataattttaattagtcacatttaatatttatgaagacaaggaaaaccagccagacagtgtatacatgcacagtaaagctgtttctagactactgtgttttcatcagtgaatataagccatgtacagtgttgtctaaacatcaaaggaatgcgctctttctctaattcaaattctgggtgattcagaggcatgactccttccaaagtgctgagtttggctgataaaatgccacatactcagtcagccctcccatgctaagcatgtgtaaaagttctctttagtgtgtggttttggctgctaagttcaagaaacatttattgaatgcttctatatgctaggcacatgggtgaagcaggaagttgtctaggggtctgttctggtataattctaggggagccttttccactggaccagtccacagccttaaataccgccattagcagggcatcactttgagttagtccaggagtcactgggattcctttttggaaatgcagatattagaagaaatacttcaaaatggtcctagcactaaagcctctgggtgtgtatatatatatctataatcaaatcaactcttaagactctgagctgaatagcaggtaatacctaggagaaggagttagtagattctgctaaggtctgtaatgagccctgtgaagccagaatatagcggcaggccaggaaacgtgtcttattgcactaaggctccctatcaaaaataaacttcaatttatttcttttgtttttattttaagaactagcgctgcatgacatccatgttttagaccttgatgcccaaaattgatcagattaatatttgcagttcaaccagcaaacaactgattcattttcatattttttaagccaagtaagcagatccacatctctaatgaaaagtagcctgaggctgctttcttcccctagtcctctgtatggccacctcagaggtgatcatcttcatagtcagccagtgcacaaaatctaaaactcagtgtcttctcatttgactctaattgataattggtttgtttctatggttggtgataggttaatgtctctggcagacttgcacagggcacaaaatgacttgaagatttctcctgccacactcacattctcttccatggctctgaaaaaattattatacattcctttagaattttaaacataatatgttcatgattctggccctctcttccaaggacccaaaatactttagaaacacgtcagttaacaagtttattattatccaagagaaaattattatacaaactcttgttcaaactcatatttgcctttttgtgatgcaactgttgatattctgattgattttttttccctgggtctcccataagttcttcacacatgaagcagcttgcatggactagccatgtttgttctaatgaccaacaagagcagaagccccccaaaataatatctttaaggatggctaggattattgctaggtgctgtactgagaagggctttctataggttttctcattcaatcttcacaacaatcccaatagacaggtactgtcattatcttcatttatgcatgaggcacagagaagttaagtaacttgcccagggacacacagctggtttactgagattcgaatctgggctcagtgaatcgaacccaggctcctaattactgtgccacagtgacccatgcttcttcaaggggccaccacagtatgaaggaatctagtcatttgttggcagggggtgcttagggatctcccagatcattggccccattgtgcagatgcctgagtggggaagtagggaaatggtcaggaggaaaggagagccctggagtggtttgcccctgctcctgtcagtggtctctatacttgccttgtcacctgcttttcatagagcccattttgaaggatattacttaaggctaggtcacacttgaagcaacatcagcagactcttaattatagatccacatagcgcattgctgcagagtgtgtctttgggatgggggtggggtttgtatgcaatagagggaataaatctgctttgccctccttaatattttctctgagacagctttggtcttcccaatgaaaatcataactaagtcagtcttagacatgcagctcttcctgggatggcagctgtgatatgctggtaaatgtttagtaaccttctccaagtgaacatctctgatttgtagtgtttgtcatctccttagtttgaatactcctactgtagcatatttcaaattattaaggcaatcacactgaagagagttgggaagagccatgagcaatcggcttcaacacatcgctaaacagaggtcaaaagattagggtgaatcaagcagtagttgctgcaggaggcagatgtcaggttatagccctctcccagattatggaacatgacagcacacactgtgtgctgcttcagtctgcctcccttctctccccactccaccttgatattcttccaccataaatcaaactcataagaatttctaaggcaccctgaaaaaaaaaaagaaatcacagaatttgcagcctataggtagtaggttgagaaaggaagagggagcaggccatcaagatgccttctaataggagacgggagaaagtaggaaggagagagaggggaggaatggttttataggcaatgcagatttggatgtgagtctttggcttttttctcctatctggaggagcatcctccttcccctgacatctgcttgcatgtctaagtcactcctgggaaatatgtctaagcagagaaatggcctcaaggcccaattcccaaaccattgttactgacccctggtatggaccatgttagatcagatatagtgtattctcctcctaaaggactccagggccatggactgaataccctgcagtttcctgacatgctacattctagcactttatgatttgagggtcaaaaccatctcaggatccaaatgtactccctgttgctttgaaatatcagccaacagatatttatgtatagagccctgctccatttcccattcactgccaggcaccacaaagtgcaaaagcatagaaaacatcatttctgacctaatgagtttacagtctagatgagaaaacatgacagccacatatgtggtccaattcctaaataaggattactttaacagtattatctaattaagtgaaactatagcacttataataaattgtgtgagatatataattagagtctatcataataactacttgtttagtaaagacaataaaaagattagtgcatagcatggtcgttaatagtattcttgtttattatataacaacgtatgcccattttaaacatacattttcaacctattttacagttagagtcacacaaatatgattgtagcagccagttctatgtaataaaaatatttcttctgctggccaaaagcccataccaacactccttgctgatggagatccaagactttttttgaaggaaaaacctggtatgagaaagacattcacaaatccctgtccattttgcagtaaatctgcttaacaaaaaggttatcgtctcagcagagtattgacataaagtacaggtttgcatatctgtacagtgttaagtagctcttaataaaaccagactttttgaatgttgcattgattttacctggggcatttgtacgtcttctcctaataagggcgctgaccactactggttcatatagcttatcaggccctgttcagttctgggtataggactgtgagactctcatctcgagtccttcagggacacaggcgccctatcatactagcaaaggcagcagaagagggcttgcaagtcctgcccttgtctttccctaaatcagcaagttgctggtgctaatagagggaagcaattacaatccgattgtccaaaagctacttttcacttttgaaaaggcttttgcaattgtttaagaatatgaaatgcctaagtaaaatttggagaatttgcaatatatgaaagaaaaacagttgtaaatttaccctgtgtctctgggacagtaggcttatatgagacagccagtttctctgcatttacatgaatactttcctgccttaggagactactatgtaagtgtctgggttaagaagccctcctgctaggcctcaaattaggtgagactggtaaagtaaataaaaggaaatggattgtgtccatacatgacttcattccatcctttgaatggctttatcaatcactaggaggggtgagactcagcaatgatcatgtacaatacatgcctccaggtcatagacagctgacttgatttcctaagcagccgacttgatttcctaaggtgctttcggtgtgacagacccagaccctcttccttcaccattggatatatccagtatagcttttctgaaattattagtcttttctttctctcagctcttgctactaattacacccaaacttcttaaactatcttaaacttaaacttcttaagatagtttaagaagtttggatgtaattagtagcctgtggtgaattgggttgcacacattatactttcatttgcccacaatggtctacccttgttttctccatactaaatttctttttctgtcctgtgaacttaaatttaaggacttcatttagctgcatgttgggataggatatgggtggaggggtgtttttgattgtattttgccaaatctaatctgtgtctgatttttttcaagttttttatttctaaaaatgccgccagttggtggaagtttggaatctctggttaccctgaaatactaagagaaacactcagaaattgtatttgcagagaattgcttatttaactatgctgtccaattagacatggggaaatgacttgttcttcattagttgaatattgcacatttgctagcatcttactgcccccctgctgcagctcacaatgagtgcatccttctctgtaggcattctcagtttgtgttattattgtctgactggtccctgtcatgtttgctcaggttctggccatgtgattagacactaaaccataactctgacaaagttatgagtcctgttttgccacatagatgcaattttaaagcacacatttagtgggcaagagaccatagatgggaaactgggacagagctcgactcttaagaccccttgaaatggggagacgtggcctggaacccagctctcctagagagctctaaacaaatctgaacgtgctctcgcctgggcagactgtctcagagtgacttcagggacccgtgagtttcggtactgtgccatgacttggaggaacaattttatgttaagatgtctcctggagcaaaggaaggaacaagagctttgcgcttgagagaaagaaccttgggaaatttctttaacctctttgatcctttgtaaaattataatttttaaaaaagtaattatatgatgttttaaggatttaatatctaatctcttttttttcttttttctttttcttttttctttgagacggagtctcgctttgtcacccaggctggagtgcagtggtgcgatctcagctcactgcactgcctcctgggttcatgccattctcctgcctcagcctcacaagtagctgggactacaggcaccctccaccacgcccggctaaatttttgtatcttttagtagagatggggtttcatcatgttagccagaatggtctcgatctcctgaccttgtgatctgcccatgtcagcctcccaaagtgctgagattacaggcatgagccaccatgcccagcctacctaatctatttttgaaggcctatacacatgtatacatttgagataaatatttccctgatagttttattatggccaaatagtctgttaggtgcaatttaaggattatggaaagacattctgagcccaaagacttattcccaaaactgttctgaaatgatcacaaagttgtaagccatgtctgtggtctccatgaggttctgccaaaatgaccttgaacaagtcatttaacttttttggacctttgtttttccatctataagataatagtgaacctatcttgtagggtaacttagggattcaatgagataacatatgcctgacgcatggcagattcacaataattgttagttccctcttgcccctcctctcttcttttattttctggtctgaaatggtcaacacctgccttgacaccaaatactaataagtagatgggtaatggactacaataccctctttctcagttgccccccaaagagcagaaagacagccttttcttgtcaccattaactttcaaatattggcaaggaaacttgcagtggacagcgggataagggggtaaaggtggttattaaaatcttcagttttggaaggtgtagtcatcaggaacttcaaggtattgcctgtactgtaactgtgtgtactttattgtgaaatgaaagagatttttcccctttaatgatgactacagttgcagctttgactgaggaagcagacaagagaaaaaaggcatctaattcaggaaaggtcattacacattatacatatcatatctacttttaaaagtcagaatgtttaaaaaataaatggtcagtcttcccctggtgaatttagagacaaaagaatgttttcaactcattataacagaggaaaccacacaaagtcacacctacctgcatgcatgcatgcacacacacactttgcaagtaaaatatacatttttatgcttttacatgtgttttctgttttggtggtagccttgagaattgggtgagtcttgttaggtagttagtagacttccatggagctaaataagaaggatttaaggacaattgctctttgatggtaagaaagaattaatactaaagtattttctcccacctataccctagttttgtcgtcaacctgattataaagtgggcagaaaccagaggaaccaaataaaatgatgcattttattaaatttgtgtgaccttttcaaatcttagacattgttttggtattcaccaggagaccattttactatatttgaatcagacctctagagaggagctagagagttgcttagatattgccctgtccaacccctttattttatgaatggggaaactaagccccagagaggtcacatgactagagtgccctcccttattattccctctcttttctgatgtctttatcgtgtttgtttgtttcatctctccctaaaattgttagtgttcaaaagcaggaatactgatttgcgtgagtagctttccccagcatctcacagttggtaatgtgaggtaatccagtgagcgccactcttaatctcccaacagaaattacaattacaataaacaaagagaaaaaagtactgcatgtaattctttagtaactaattttttaaaattatttgatgcaaaatttcatgtccaagtgtaatatttttgcccatttcttgggagtgtaattagcagtaagattcctgtgttacattaagagaaaaagatgtggttcagttctcatttggcagctcatccaatatgacccaacatttaacagtttttttcagctgcttttatattcctaccactatttagagtcttgggatataccagggaacaaaataaagattcctgttttttgagacatcttaatgtatatttgtgacataggaatgaatgattgctttccaacaccagattattcttggacaacattctagtgaaagtgtcgttttaaaaaattgtcttcctcaaaataaaaggactagtttctccagaaaattgttttttggtcaagttgcatgaaatttggcacaatactgccgccttgcggctacttcaatcagaaaaccacatacattacaaggtcacctctgtctttcaagtaagatttacaggaaaattattctgcttctcagtggaaatatttgacacgaaatgacctattcaggaatatttaaaatctaattccgtctgatttttaatagaacgattggcaggcctccattgcttttgtggttgggaaccagattgaagatgatcttctcatccaagcccttaccgtggctgtccaggtccctcagcgtaaactcttcagtatggtgtcgtggcaagacattctccagcaggtacctgtcccttcctacctcaaagccacctgaagacttttttacttaaaataatagaatagaattataaaataaactatcatattcttgggctgttttgtaaattttgatggattattttaagtaactatttagccagaataaatttgagttgttcaatctggaagaatttatttttgtttattaattttgttaattcaatattcatttatttgacaaagatttctgaggtcataccaggcaccatgctaggttctgtgacaaaatatttaattcaagttaaataattataaaagactagactatttaagattccagggaggtacatgactaattggaaaatgaaggctacagagaatcatagctgtcagaggtcagaggacagcaataatatagaaaagatctgccaggtggcacatacccatacaattactgacagcttacgaagtaactataaatattttacctaattcatgggtacctctttcttgctaggttccccaacccttcagatcacctagatatttgaaagttacatatatctaagtattcttcaaataaggcttttttcatcataagtaaatttaattttcttacagattaatgaaataaatacacttgttggatctgcttcatctaaaaaggcaaaaaaacctgtaggtggtaatgctcctttatattatgaggtaagtgaaagtgtttatagaagatatttttgtgtttttagaaaaaagaattgaagtaataatttgatagccatttttaaatttcattctttgaaaataaatgcctgctcctcattggagatatttgttcctgatggtgaacacacacaaaaaaaatctgcctccttttaaaattttaaaatttcaaaatttccctttacaaatacaatttcctagatcgtttataccatcattgcatctaattgaaataattgaaaaatataaatcagaaacttctatagacacaaagtattgggtcatactttctcatgataattgctgagtatgtgacagcattaaggagagtcatatgatcagtatattacaaagtgttagtttctcgaaaaaaacaatgtaaaaatgcgccagaaagtgtttcttgtataagacagaggtacagctgcagtgattttccatcagtttgtgaacttggtgcacggtttatatcccactttaatcgatatgaaaataatgatactcttcggattaatggtccgttccatttccaacagctgcttagtataaaatctggcttggctgacccagtgggcttgtgcaaaggacgtaggactcattctccgtataaggggatttcttctcaccctgccttgttaatatctaacttacagctttcaagaaactataaaaatccagtgattaattagaatatcacttaaaatttgtcaggcactgttttatggagcagccgacctaaaacataaagagttttgaatctttctaagacgaacttgtttgcactttatttcagtgatgactaataaagtttttatgtgtctcaggtcttgggtgattacatacggtctatttagtattgcttgagtactatctgaacaagtttcattggatttattcacaatagacagtgctgtgaattttatagcattaactcttgctacgcggcgctcaccatcatgccaaagttatctgtgcttttgcagtcaaataatatactttgtctcttttttataatgttccgaatgtgtgtgctccacttgaaacattatgtgatacgtggatttaaaatactggaatttttcttgtgagtggctatagaaatccacatccaattctcaggcctgggatcaattaaccccccaaaagattctttcttcttcacagatactcagtaaaaatcagaaatgatagcagcctagttttgatgtctagtctggacaggcattctgacttggatgtgggatagcacaagattacaaacccagagttaagttagaaagccattcctctccaatatgtgctgagactcttggttgcatattcttcactcagggggtccatttcacatctggctctaccacattcttccagtggagcatttgggcaataagcctcccacactcgctcacatacactcttctgaatggttccagaagaaaagagaaggtgggtggagtgccatggagactgaacctgaggtgcaccagacattcattaatgccagtcgctgaagcaaaactaataaagaccataaaacaaattcaggctccttgtcagcatcagccaaggacaggttgcacatctggagaagaggggaatatttcccatctcagtcccttcacatttaggacctgctcaagcactctgctacctagtacctctcatcccaagacaattgaaaagtcactggcaacccctgcagagctgcatggtagttgcgagtggtggccatggaataggcccagaaagtctcttgggacttctggacctttgagacatgtggacagtgtgctcatgaatctatttctgtttagaatcttgcatggttgtaccaactagtgagaggtgaagctgcctaggcttctgggtcgggtggggacttggagaacttttctgtctagctagaggattgtaaatgcaccaatcagtgctctgtgtctagctagaggattgtaaatgcatcaatcagcattctgtaaaaatgggccaatcagcactctgtaaaatggaccaatcagcagtctgtaaaatggaccaatcagcgctctgtaaagtggaccaatcagcaggatgtgggcagggccaaataagggaataaaagctggccacctgagctagcaccttgcagcaggttcgtgtacccttgccgagtgtggaggatttgttttttcgctctttgtgacaactcttgctgttgctcagtgtttggatctgcaccaactttaagagctgtaacaccacgaagtcagtggcttcattctttgaagtcagtgagacgaggaacccactggaaggaatcaactccagacacactaggacacttgatagtggtaaactcctgaggagcgaaagtcttgcaacatcccatttctcaaaggaaactctgcactgtgggagaagagataaaagataatctaacaaattccttttgttacatggtaactttttagaaacctccattttggagataaggaactcacgatataacagccatgcatttaaacacctgtatttacttctacttgtagggtactctcgttagctttaaatcaaagcctagttattcttattttaaacacaattttaatcaattaggctttctggtttcctagcctgtggttgattagaagcagcaaactaaagtgagacttctgtatagtatacttcatccatgagtagtaaaatagtgtcagagccacattgcatatttccaataatgactccaaatgtctgggctagcaaagaccacattcctaagtgatttgctcaagttttcatttggatggcatggtgttgtgtacacacagcctcattatgagattgtgtaatttcccctgaaaccttagaatttcatctagccatggcattgtatatatgaaagtctttatttataaaccatagttctttgaaaagctgcttagatttgtgctaatgtaattctgtagagacgtagctgcagctcatttgttcattcacattctctttttggaaagcatgttttgctctactaggaactgtttcaagaactcatgtgggaatgagaacagaatattattatttgtgtatattctcaggaatgttggctactgctttatcatctcattattatttaataatgaggatgaagatgaacccatgcactggcatataagcaccatttcccacatgtgaatcctacttgaggatatggacacatttgaaaatatacgcttattgcctgcattatatagtagccggttttaccgaatattaacaaacatactcgttaaagcactagtgccaggcactatcagacgatgaagagagaggaaggaatattaatattataaagactctaacctcaagaagcaaagactctaacctcaggaagcttaagaacaagctagagagaaaaaaggacaaaatgtatatggacataagcctggcgcgtggtaggcattcaataatagttgctgcgtaagtgaataacacaatgcagaaaatagtgaagttcttgagagacaggtaaagtgtataagaattcaaaggaagatgagattatcattagctggggtagttggcagggaggggtgagacccagagacatttttgtggaaacattgccatttgaaaggaaaggtcctgatagttttgatcttttacatatattacatcagttagcccacatcacaattctaaaaggaaagataaaatctccattgtgtgcacggggaaatggaggcatagagaaggtaggaagtctgctcactagcaaaatgaagaatttggatttaaccaaaggtaaacctatagcaccaagtttttctactttatcaccaaccaagtaatctttcactggtctaccccttggataggtagatcttgactttcaaatgtggaagagggcattctaagaaaagggaatagctcaagcaaggccataggaatgagagaagaccgaattaatgtgtactacatttgtagttatatggtataatatatgctaaataggaaagatgaattccgtacatattttgatggcaactttaaaatcctaaagatggaaatctatgaggaaacatttcaaacactggaaaaagtacatggtttagattcatgcctgaacttaagtatacttgctacctatgcacaaataattttctgtgtatgtatgctttatggcccacatagaaaatctgacctgttcatttacaggtatagtcagtcctgaccaaaattaaaaaggaaaatatcagtagtcattcaaaaccaactgaaatgttctcgatgagagagttctacgtgtaccatagatgccaagattctcccagttgtgactaaatctgatacacagtaagtgaactttatgggataaatgtgcaaattttaggtttgacattatcactttggtaaatcagaaaaagctactagttgataggggtttacttatccaatttatctgaaatcagaaccaaccatcctaaaagtttttaaattccacttcatgtttcttttcatttcatgatggtggtcaccatgcctaccaaccaggaaatgagccttcatccacacaaatgggccgtgatttatgtgcctgtgacttatttataaaagacgcattaggtcatcacaaaatgaaaaataaaaaaaatgaaaagcttactgaaacaaaaattgtctataaagaataaaagttcttatgctctagttgatgactcacttatttcaaaacaattttccaagtttctgtacaataaagaacttgaactatcctaaacattatgtgatatggtgcaattttgtaaatgcaaataattattaattttttttttactcctgtcagtaaaaaaattctcatatttttaagaaaataatttttaaaataactttttaacaaatatatcttaaaatatttctacgggcctttctattgcaaccgggagaccatcaaatgtggaaagatttttctgatattagatttaaaaataatggaccaaatgcagtttaataaaatgtagaatgcaaattagatcttcagatctaatgcatttcaccatactttaagacactatgctagtgcctcagattagtatgcccagatgtaatagttccattttttgacttctgtttcctggatgtatagaaatttttctcaggtcttttccaacatgtatttattagtaattgacaagtgagaacacaggcttaattataatctattttgccactctttttcagattcctgatatgaaactcattttttaaacagtgccttgaattaatagtcaatttaatcgaattgtaagcccttatattgggggtggcccttgtcagaatgaaaaatggaaaactcatgcttcagagataggtacaaataatatgtgaaaacatttaagaggtttgaagttattaaaatggcagctctactgggaacagagagagcagtatgtcatggaagaaacgaaggaaaagggagacaggaagcattctctggccttttcaatcccgcgctttaaaacaaaacaaaaaaattctggaagaattggaagctagccaacctaatgccgttatttcatagagcttagggacacaccaggaaattgcaggccagttagtttaacttcacttgtaggaaaagtattaaaaactgctgcaggagatcaagtaaaaggatgcttagaaaagcacagcttgattaaggcaagcctggccaacgtgattttcggaaagggaaggtcatgtcttaggaacttgttgaaattctttgaagctattatggccagtacagtcttcaaagaatacagcaagactcagaatctgcggatctttccgttccacatcagtccttcagggatgcctacagaacgtggcccacaccagggcctcggcactccacatttagaaaccactatcaaaatagcagaaataacccctgatggaacattttttaaagctggaaccaattaatacaacctgatatttataaatgtaaaataatgagacttggaacaaaatttgggaatatcaagctgtaacaaagaagtgctacgttgggactataaaaacaatctaggagttcttgtgccaaaatctgggttttggaggcatttcttacccgaagaaggaaagaagaggagaaatagtaatgctagaaacggttacaaagggctatgaagagttacaaatgaatgacttttgtcaagatggggaaaagagcagtcagatgtgttaacagccctgggcccccacatttctggagggcaccaaagcagctcagcagagaaagtcaagttcaagctagtcactgaggggcagaaggtcagggctccattgctttaggaatgggctcccagggtgtgaatacgtttgcctcccagatcagaaacctggagttctattttcaaagaaaagcagaactcaagtaaaggcattcaaaaacaattcaaatcatgccccagctctcttccaccctgggggtcaggcagctggccaagcccatgtggcaaatagttagcagtccaggagaggggaggtagacactggggaggtgtggtggtgatgcagtggagccggggatccagcagcaggaagcccatgccacacaaggactgggttgctggctaggacctgcaggcagtgggcaaggcaggaatctcatcaggagttccaagacagacctcagtggagggccagccacaagaataaagtgaggttcagctaatgaagagaagtcatcacagcttctcctccaggtctgggctggggtggtttctgaaacctcttaacaccctatactctacagacaccaggattggaggggtgctggggaaggaatcaagaagattgtatcattctgtttctgtatttaaaactgtgaaaaatcaataattacatatggtgataataaaagttaccacttattgaacacatgtattccaagtcttgtgtgctgggtagttcatatatatcaactaacctaatctctttttttttggctggcttttttctttttgtggggaacaggagcgtgctatgttgcctgggtaagtcttgaactcctggggttcaagctatcctcccgcccctgccagcccaattactgggattataggtgtaaaccactgcacctggctaacttaaccatcttaacaacctttcagatacctatgaatgatgaaatttgaatcagactggttaggtaacttgttgattcagaagtctgttttttctacttgcatcacacacaagctgagaataaatagtttaaattctggaagtgactgttgtggtttaatatgtcttcaatataagctactgctagttacttagaattaagctttaaatctctcagtagttctatgatatgtttattacttttccttctactcaggcaaaaacatgaaggtatatctgcagatgatgaagagatcaaataatttcagttggagcttttaagccacttcgatgagtggcttttgcccacatgtttgggtcaacagggttttttaattcttatggttaagatttatatggttaagtgaccatgtcttttctttggaggatgaaagaaagaaagatggaaaataagagggaagttaatacatattcagcagagatcaaagtgtggagagacctttctaaaatctcactaattaaaactaattagaggtaaattcatctccagagtacctaccactagtttggtgagcgatatacctagtggttaaaagtatggaaccaaaccagactgcctgggatcatgtcctggttccactgcttgctagctgtgtaatcttgcacgagttacataaccctgctgtacctctgttttctctttgtaaaatcctcgtaaatgatagtatctatcttataaagctgtagtggtgattacatgggatagtaaatataaaatacttattacctggcacagacttaagtgtccataaagtttagctattactattactattatttttaaaatttctattctcagcaatattcaacatcagaacatgaaaatactagaaacccatttatgagcaggctttaaattttttttattatggtaaaaatatgtaacataaaattgccattttaaccatgtctaagtgtataattcagtagtgttaaatatattcactttgttgtgcaaccaacgttcacaactttttcatcttgcaaaactgaagctctatatccattaaatgacaactgctgatttctcctgcaccctggcccctgatgaccactgttcgattttctgtttctacgaatttgacgactctggatacctcatataaatggaatcatatagtatttgtcttgttgtgcctggtttggcataatgtcttcaaggttcattcatgttgtaccatgtgtcagaacttccttctttattaaagctgaataatattccaatatgtatataccacatttatcttatgcatttatccattagtggacacgtgggttgcttccacctcttagctctgctatgaacgtgggtgttcacattgtgaggaggtttttctctaagtggagtatgattactgaaagttaagtagacatttaattaagcaagtaagggaagaaaagaagttaatcagtggtcaaaggatatttgcagtgtcccattatactagtcctcatggccgtgatggagactaatatacattattcttctttgttatgtcatgtaaggggtcaatatgacggaacaccttaagaaacaaacagcagtagtaaccatttctaaaataaataattttaaaaataaaatttcatgtttatgtaaaaagatgattttcacactgcttattaaatcttcacgtgaactgggcagaacagttaaaattaatctccatagtgcaaatgaagaaatggaagcccaaaaacttaaatgatttgttcacagtcaccaatggaatcagcgtcagttcttctaatagtctagagcttgctctacacctggcagaagggagttctcattcattaaaaagttcttgctcatttatttaccacaagaaaattgtatataatggataaagatttgctttattacctagacatttattttaatgtgcattaaaaaataaaattagactaacttgcaactcccccaacactgtgcttcggacagagctaccttatttttttaaaacttgatttacagtcagcttagagaaaatgattaggtttatagtacaggtggtacatagctttggctaaatcatcaaatgatagtcaatgactaaggtttaggaaatgtttcattttcatgcattccataaatattcaaaggtctattatgtacaaaatctatgattggattgaccttggtgaacaaaatagttataactgcctggcctcatataatttacatttgaatgggggagacggacattaagcaaaactcaaaacaagcaaacaaatatatacacaattttgagttagtttcattgctttaaatcagagagaattactgaggaaaacactgtaggctgagtgtttggagatgaatgaaaggaaaagaagatccaactgaaaagagcaagggaaaatattcaggcagagggtgcaaaaaccctaaggcaggaataaagaaggcccgggtgcctgtagcactgagagtgggagacaggagaagcccaaagaggccacatctgctggctggtgagtccttgttaaaaaggagtttgccgttttatttcataggaaattagaaagccattaagactttaaagaggagaatgacacaattaagttcttttaaaaaatattttctggctgccaagtgaagaataaattaggatgaaggcaggcaaacatggaaatgagaccagttaggaggccactgggggtatccaggtggcaatggggagagcacacagattcaaggagaatatttagaaggaagaatttggcagatcggtgcccttgtgagatgtgaggggtgaagaagaagctatcaagagtgaatcccatagttctggcctgagagactgaataaaaatatcctttttttctttctttatgttttatagtttcattcctttttattgtaaattgacatttataattgaatacatttatggggtaaaaagtggtgttataatttatgaatacaatgtggaataattaaatcaagctagttaacatatccattacctcaaacatttaacattttttgtggtgagaacatttgaaatttaacaattttgaaatgtacaattctctattattaactatagtcactacactgtgcaaatttaaaaaaagaaaaaatgtatttttccttttaaactgagattttctaccttttgactattgtcttagtctgtattctgttgcttataacaatacctgaaattgggtaatttataaagaaaaggaatttattttttatagttaaggaggctgagaagtctcaggtcaagggcacccatctggtgggagccttcttcctggtgcgactccatgcggagtcctgaggtagcacaggaaatcacacggcaagggggcgaatatgctaatatgccagctcaggtccctcctcctctttttataaagctacaagttcccctcctgtgatcatctattaatctattaacccagtaatccatgaatgcaaagccctatctggtcacttcttaaaggtcccacctatcatactgccacaatggggattaagtttcagcatgagttttggaggagacattcaaacaatagcaaccatcatctttccattccccccaccccccagtctctgtaaccaccattctactttctgcttctatgagtttgatttttagattccccatgtgagtgcatgcaatatttgtctttatatgcccaactcatttcacttagcataatgttttctgattccatcacaaatgagagtttccttcttttttaaggctgaatagtattccatttaatgtatataccatatttctttatctatccatatgttgatgaacgcttagattgattccataccttggctattgtgaatagtactacaatgaacatggaggtgcagacacctctttaacaagttgatttcaaatcttttgggtaaatacccagaagtgagattgctggatcatatagtaattctatttacagttttttgaggaccctccatagtgttttccataatgggctgtcgtaacttatattcttgccaataatgtacaagggttcccttttctccacatcctggctgacacttgttatctttcatctttttgaaaaaaattatctgacaggtgtgagatgataccacattatggttttaatttgcatttccctaataattagcaatgttgagcattgttcatatatctgttgtctatctgcatgtcttcttttgagaaatgtctatccaccccaggtctcttgcccattttttttaaattttttttcttgtccattttttaattgacttttttgttttcttgttattgagttgtctgggccttttatatattttggatagtaacccctatcaaatatatggcttacaaatattaaaaatatcttctattacagagaaaattaaaggaagtctaaatttgggggaagtctgaaagtatagtttgagatagtttaagtcacatatgtctgaggggtatctaagaagagatatcaggaagaaagatatttttagtgtatttttcattttttgtatccttatgtgcctaactcagtgctgatacatagtaagtattgtagaagcgtttgttgtctgaaagaattaacttactaagaactaataacaaaataccattaaagactataagaagtaaataatgagccattttaacggtagtaattcagtagtaattgctggtgctttcctgggtaccagcaattttggtcctttccattttccctttattggttccacattttctacaatggtttgtatatgtgggtggcatcccagtggttcacaaagaaatttggttggtttcaactagcatgtgtgtatatgtgtgtatatgtgtgtatatgtgtggtttgtgatgtaaataatttttcttctataaatataggtcaacatttttgaaaaaacactgccttagaaaccttgaaacctattctctattacatttcctctctcagcctctcacttaatcctgggctaaatgatacagtgttcactcatccccagtctttcctcacccagcagacatttgctgggtttctattatctgctgggtaatgggcacaagattgagttagacatggtctctgccctcaagagcgcatagtcaataattttgcaaacaacgtatttgtttcctattattttgtgacattttatcataagaagccagatataaaagctgtatatttaagccgtggttataattgagtctgttcttcattgagctctgtggctgacctcacttattgttcacaacttccagccaaaagggtcatgatccccagacagagtatattggaaaggagaaggagggagagacagaacacttacccaaatagtcaaagatgcaacaaaaatacagaaggccttgtttccttagagggggagaaaatacagttgcaattgaaatatggtaacaattttcatgcttctgcatgtttttaatgtgacctctatttctgaaattctttctcctccatcttcagctgcaagaaaaggaagaagaaataccaaagtaaacatgggtataggctgggaggattgactattggatagaaattcatttatatattgaaaaggtactgtgcatattataggcactcaatattaatttgaatgaatgaatttcagatatatttatacattaaaataatttactcttctatttcacaaacatgattggccaaaaaaatcactctgcaaggtaattgaaatatgatttctatattgcttcaataaatactttaaaaataattacggatttagtagtttgaaacacaggaaacaaatcctacacaaactcttactcagaaaaactgaaattgttcaataaatgccttcctttaaaagtttatattttaacttcatacatatttggatcacagtgctcataccatttgaaatctgcagaactctaatggtgagctaggccaacaggatgccctgcatagtacctggtacccatgaaacactcttacactaacaagcttatcattgtcctcatgagcctttatcagaaattcatatggaaagacattctatctgggcttactcattcatcaggcaatccttagttagagattatcctcattatcaaatgaatcaccaaattattttcattattttgaattattattgtttcatttatccctggagttgcagagaagccagaacagtctaataacatgtcacatagtcacaggccaccactgccaagacctacatcttttgtgaagagctactcttgttgcatgctcaaagatccattttaggaatatcattgagggaaaaaaagatacaggctctatctggatttaatgcaaaggcctaatatattacatttcgtaactaatgagattttgaggaatgacagcaaatttctgatttgctctttcccccagtaaaatgtctgctttgagttatgcagaaagaattcttcttcctgccaacttgtttcaattccctatgcaaaagcatccacagaacattgtcagggctttcctatggaggttcatttcatgattcctccatcattaaaaacacacacacacacacacacacacacacatacacacacacacactttacccctttctttaaaacaagcaaaggaaaatgcattggtgaggtttgtatgtggtgctttccctttctgaaagcagagacaagtattagtcatcagatggggaaaagagtttctccgtttcaccctgggccagcatcctgttttatgcatgcaggcccgccctgtgtgtaggtggagaaggcagttgccgtgtgatgtgatttaagaggtgctggaagttctgcctgtccaaaaatagcccccacacccgcctgttgaattcaggcacagtgtccataaaaccatggtttaaatgaaatgaaactgcatttttagaatgttaacccattatattcgttatcctttcagtatgcatttatttatcagagataaaagctggatcctgaggggatgtacatgcattcggggagagtgaggaagcggttagcaaagtctaaggctaagagtaatgatgcaagtcactggaagcaatttctgcataccacgagtgcatttgttaaaattaaacttcttccatattcattcagatggtccatcagtcttttttgaatcaatattttctggaacatgacattttctcaaacaggcaatgctctttgctggaacccctaaaaagaatttaagaatgataaataacacacatttggaagatggtttttagagtccaaaatactttcacagtatgtcaaattttgatcccaccaacaaccttgtatggcagatttaaggcttactatgctcatgtagaaaatgaggaaagagcctcaaagaggttaagtgacttgcccagtgcctgcagttattaatgacagtacctcgcaatggaacccagtcattctgactccaaatccaaagtttgctctcttccttcaagctcttcaggacacaatccctgcagtcaaggagctgacaattaactttaacctgcttaaagctatctgtctaaactaaagagcgagacctggaagctttttccagtagtagtagtaagaaagtgtttcccattgtcttaaaatttccagttgcactgtgccaaagactctgctcacacacatttggcctcagaaatttgcgtgaggttttacaagtttactcatagcattccccatgcagaaaacatctcacatttagaatactgaccacttttcacaaacttgtcaaatacaacagtaaaccaagtcagggaaaataaaaatgtgaatggtcagaaattaacttaagatattctccagaaacacttagaacctaggggtgattttgagagtggggttaggacctgaagtgactgcgaagcctaggatttctttatcaaaacagatgtgctttgctccataattgaacacaccataccccacacacacacacacacacatacacacacacacacacacacacacacacacacacacacattgcttgagctgataaaccacagttttgtagtatctccagctcattcctcctttggttctggcacagtaagttcatagcacttcccatgacaccagacacttttttctgaactagtgaactagcactgcttgctttcctggcctttcagcaagcctggtttggtgagaggagggctggctggatgtccgccaccacctgctgatcacaggggtcccgtttataatacaaagcataacccacacagcatttgcaaagatctgggtaatttgtgtgctaattcttttattcagcacatattttactggtggccttccatgtgccaatcacaaagttaattccagccttcaaacagcttccagtcttatgaaaaacagatagggaaatgaacagttgtatcacattttaaaaggtgcaatgagtgcaccgagcaatgcttaaatctttttaaagttttgagagtcaaattttaggaaaatggcttgaaagctgaatgaagaagtcatgaaggaggagaggaattctaggcaaaggaatcaggccatgcaaagtcaggcagacagacagcaaggtatgaccaaggaactctagatggtatctctgatgtgtataaggagggaaattggaaggagtagccaggagttagtctggacaggtggctcaaggacaaatcataaagggccctagtatgccttgctaaggagtgtatggtttatcctttaggtatggggggccattgaggaattctgagcaggggagtaatatgctaggcaaagatgttagaaccacagtacgggaataattccatgggaagttggaggggtggcactgttaaaagcagttcattgctggatgcatttaaattgtacatatattttattagctgttttattattatagcaatgcatgttaactgcagaaaatttggaaaatatagagaaagcatacctcatatattaggtaggtacttaagtaaggaaaatattccaccactcagagatgtatacttcttgttataaaataggaattatattatatatgctctatatcatatcatttccacatactgtgatgttagcatttttctaaatccttattcagtgtatatataataaaaagcatgtttttctattcactaatttatttaaccactcccccttttgctaaatttagactgtttaccaatagcaatgaccctgattgtttccttatgaaaatttcataaagtagaattactgggtcaaagcatataattctttttaaagctcttgacatatcttgccaaagtgcattcaagacaatttgtatgaatttacagtccttctgatagttccaatttatccatgccctcttcaaccttttatttttattctagtcaatttgacaagcaaaaattataaggttgaacatttaatcatattttgattggctgtgttttgtgagtatggaattctttaaagtgaaatgatggtgtaattttgttttcagactccttgagataatgggagggactctgtattgtcaaaattcaggctagggaatatttcctttaagtaatttcacaacagatattaggtgctgtgaataatacaaaaaggataagccatcgtccgggccctgcacaagctcacagcatccttcagaagaaggacatgcaggcaaaacttctaacaaaggctcagctgcaggaggtgcctcaagggaaatatgaacaagggctgtggcaatgggagcagggagagtgatcccagatgaggaagtctgagggggttgatgcaggaacctctttggcatgagaccatctaatttccaacctcttcttgcctccttgtaccagtggcatgcctcaaaaatcacctaaagagtttgtttaaaatgccaattccagatcttagccaccatgatggggattaggagtatcttcaggagaatccaggaacataccttctgaaaaagcacctaggtacttctgagcctgcccttctccaagggcagccacacttacgtccacttgccgctcacagtgccagaagggggattgccctcctcaacgataaactctctctccatctgcactctgggccccctcgcgacccacccagaactggactgtggcactgcttatcaatttccattgcccatcatgcattcattcagtctttccttcatttttgagcacttgtgctggccactgttctagttgctggaggatattcatgccttcaggatattcacattctccaatctgttggagctctgcccaactcacagtggtcagcgaagggttagaaaatgttcatgctggctgggcatggtggctcacacctgtaatcacagcactttgggaggctgaggtgggcagatcacgacggcaagagatcgagaccatcctggccaacatagtgaaaccctatctctactaaaaatacaaaaaaatagctgggtatggtggcacgcacctgtagtcccagctactcaggaggctgaggcaggagaattgcttgaacccaggaggcagaggttgcagtgagctgagattgcaccactgcactccagcctggcaacagagcgagattccatctaaaagaaaagaaaagaaaagaaaatgttcacgctttgcctattcccctgctttgcaaggcaaggatggcactgcctgcatgcccagaggtacctaatgtctttgtcttacagcctctgtctaaattagaatacttctgctaaattaaaatacttctgctaaacatgcatgcttccagtactaggtgtagtttaccattacacaaagctagagggggaagatacatagtggaagctctgaaatacagaaagattttgaagtttgccatgggttaccaaaatatctaataaagcctggggttttgctcatatgaagataaataaaatgcctaaattcataaagagattatatatctgatcgtgtcacccttggttacctccctccagtatcaacctcatcccccagcccaacccggcacccacagccactttccagtttcctgaatatgctactttctctggcctcagtccttcttcctgggtcactgcctttctctggcctcagtccttcttcctgggtcactgctctcctctcgtcactcttccccagtctcataccacctgacctcagtcatagccacccccactgatccttcacatttcaactcaggagtgacacctgcagggagcctttgctgactctcccagtgtggagaaggcaccctctggggccaccacagcaccctcgcttacctccactgctgggcacagcatgcgatactgtcctgaatgctccatgtgccttgtagatgatctccccaactccacgaaaagctcactatgggcagggcctgcttcttttgtctttgaatatccagcattgggaatataatgggtgctctgtaaaagtttgatgaattaatggcaaggggaatccttaaagtgtgggccaagttaatccataaccaagaatggctccatctcaacagttcatgaaaagaggacatcaccaggttgcaccacaggaagagtccagctatagaaaatcctctgagtaaggatgaacaacatcaacagtgcacccttcaggggaccacagttacctcagatttgatccaggccaaccagaaaatccaagcatgggggactcacaataggaaaagctctaggtagtggtgaaatttgcagttaaacagcataaaacatggtacacaatggccatctgatttcattcaaaaattatctaatcatctactatgctccaggctttgaatttagatcaacgaaaaatagtagataaaagccaatatcctggcaggacttactttttaattggggagaggaagtaatggaagagataaataaagtatgtattatgttagatggtaataagaactacagagcaaaagggaggaaagggtgagaagtagaagagttactaatctgagtagccaggggagcaaaactggatggtgacacttgaataaaaatctgaaggaggggatggagctatgtggtcatctggggaagagcctcccgagcaggggaaactgcaaaagcaaaggctctgaggcacatttggtgaacatcaagaagggagtggagctgaaatggagtgatagaaaatgaaagcaacaagagatgtggccagtccatgtaggaactaatctgaagccacaaaaagaattttgaaaggaacctcaaccaggcagtatgagtgctgggttcagagtctaatcctaaggaatctatatcctaaggaagtgtctaaactgtgatctggctcacacctcatagctcattgtggtttgagtccatgataggagtccactagagaaaagactagtcagttccagaagttagaaaaaggtacacaaaagagaagcagacatcacattggctggaagagcagattctaaaaacatggtgctgtatctaaagattagtaccaccactatttaacccctgtgttcttgggaaagaatcttggtctctgaaccccatgaaataatgtttgtagtacggtgtctagcatagaatatgcactcaataatccacagtatactaaaatatttatcattaggttattggatcctgaataagagatgaataaccatgttggacatggcctcctggtgggggaattaatgtctttgttgcttctgataagattggctcagaaactggggtgaacatgaggctctgggaaggtcatcagtggatgaactggaaggactggggaaagtggggttggggatggagttaactaatgccattctaccgcagtcttgagatggctccccttgaacttgctgtctcagggtggccagctgtcctgggtgccagggactatcccagttttagcactgaaagttcaatccctggaaaaccccagagttggtcaccccagtgtcaatatgtaaatgacctttgcataattcttaaactcaaaagtacttaggaatccctagaaagcttattaaaatgtcatactactaggcccaaatcaattccagagattgatttaatagttgtggggtagatcccaggtaacccatatctttaactaggttcccagaggttctggggtaggtggcacacagcatacactggaggaaaactgtcctatgggaaactatgcagcatccatctgctcattaagggctttcccagtagtcagccaggagacataccctgtatgcctcctagagctaactaacaagtcaaagagattaagggggaggacaaggaaattcaaggaataagcccttttataagcagatttcattcagattaatacttagaaattaacaacagcctagaacatcatccacatcaagctggagaaacactacaactttttgataattgtggagaaaccaagaacttagggtaaatgaagacagggctgatacactgaatacattctttgtctagcaggacattagcagaaatcccactccaggactccaggctgtcctctgaaaggggcagcttagtaagtctaaatggaagaagaagaggaagaggaggaggaggaagagggagaagaagaagacaaagaagaggaggaagaagaagaaggaaagaaagaaaaagaaaaaaacaaagaaggaaagaaaagaaagggaaagaaagaaaagaaagaaagaagggaagaggaagaagaagaaggtagagaaagaagaaggaagagaaggaggatgggcagggggaggaggaggagaaagaaattaaggaaatataaatgcataactgagagttagcaagggcaagggtgaaactgacaatatgtgggctaaatacattattatgaaaggccacataagaaaccaggtacaaaacaatggttctcaaatctagcgtatatcagaatcacctgaggtcttgttaaaagcaaacactgctggccctacccccagagtttcagattcagcaggtctgcgttggagcccaagagttacgtttctaacaaattgtcaggtgatactgatgctgctagtctgggaaacacatcttagtattgtctggttaatttttaaaattctattaattagaaggcataaatctctccatatcagtatcaatttgttcatcttctaagttaacaacaacaaaaattaaagttggcttaaacaattaggaaatgtactggcatgcagacgtagaagtccaggcaggcttcaaggtcagcttagttcaggggctccagcccacttccctgctgtgctcttaccccttccttcatctgtgtaggagcttcagcttcccgaagaaggtaaagtggctgcagcaatctcatcccttaagactcttcccagagctttgtcatgaccaaggaaaccagatcaagcagccccagaaaaccatgcctcattctactggcctgaacaaaatcacatgcacctcttgaaccaatcatggacaaggggggttaggattatttttagtgtgaaggggcccacccatggagctgtgtttcccctgagtcacatgagctgaatgagagagagggcaatgcctgaaaaaaagtcagattctcctatgaaggaaggtgacatgatggaggagcaatcagcaacctctagtctgagaagtggaacatggtatccaaaccaaaggctaaattaacacatctagtgctccagtgttggggtgcaggaagttcagggaccagccatattcagatagctaagcaggcagcatgagtcagtcagtaactagtagggtctcaatcactagtctcagactgaaagcaggatttttaggaaaatgatttaagatttaaagagaaggaaggtagaaaatggaggtggctgccagcctgagtcatttctacgaagcagggaaatactgaaagcctttcctctaagaactggaacaagataaggatgcccactctcaccacttctattcaacatagtactggaagtcctagccagagcaatcaagtaaaagaaagaaataaagggtatcaaaattggaaaatgggaaaccaagttgtccctctttgcagtcgacacgattttatacatagaaaaacctaaagacttcacaaaaaacttttagaactaataaatttggtaaaggtggatataaaatcaacatacaaaaatcagcttttctatacaccaataacaaactagctgaaaaatcaaaaaagcaatcccatttgcaacagctgcacaaaaataaagtaaaatgcctaggaatctttttttttttttctttttgaaatggaatcttgctgtgtcgccaggctggagtgcagcggtgcggtcttggcccactgcaacatccgcctccgggattcaagcgattctcctgcgtcagcctcccaagtaggttagactacaggcatacgccaccatgcccagctaatttttgtatttttagtagagacagggtttcaccatgttggccaggattgtcgcagtctcttgacctcatgatccacccaccttggcctcccaaagtgctaggattataggcatgagccactgtgcccagccacctaggaatcaatttaaccaagaagatgaactatcattacaatggatactacaaaacactgtgaaaggaactgtagaagacacacaaaaaagaaaagatatcctttgttcatggattggaagaatgaatcttgtcaaaatgaccatactacccaaagcagtctacatattcaatgcaatctctaccaaaatacaaatgacattcttcagaacgagatagtttagatatttgtccctacccaaatatcatgttgaaatataacccccactgttggaggcagggcctggtgagaggtgtttggatcatggggttgaattcctcatgaatggcttgggctatccccttagagataagtgagctcttgctctgagttcacatgagatcgggtggtttaaaagtgtgtggcacctccccacactcccatcttgctcctgccttcaccatgtgaagtgtctactcccacagttgactgtgagtttcctgaggcctccctagaagctgcgcagatgccagcaccctacttcctgtacagcctacagaactgtcagtcaattaaacctcttctctttataaataatccagcctcaggtatttctttagggcagtgcaagaaaggcctaatacacagaaatagaaaaaaaaatcctaaaattaatatggaatcacaaaagaccccaaattctctaaagcgatactaagcaaaaagaacaaagtggaggcttcatactacctgacttcaaaatgtatcccaaagctactgtcaccaaaatagcatggtactggtattaaaagagatacacagaccaatggaacagaatagagaacccagaaataaatccatagttacagtcaactgatttttgacaaaagtgccaagaacatacaatagggaaaggaaacttcttcaataaatggtgctgggaaactggatatccatatgcagaagaatgaaagtagacctctttctctcaccatacacaaaaaccaactcaaaatggattaaagacttaaatgtaagatctaaaactataaaactagtagaagaaaacattggagaaatactttaggacattgatataagcaaagatttttatgcataagacttcaaaagcacaggcaaaaataaagtaaaaatagataaatgggattacatcaaactaagaagcttctgcacaacgaaggaaacaatcaacagagtgaagagacaacctatagaatgggagacaatatttgcaaattattcatctgacaaaggactaatattcagaatatataaggaactcaaaaacttaacagcaagaaaatctaattaaaaaatggataaaggaggccgggcgcggtggctcacacctgtaatcccagcactttgggaggctgagacaggcagatcacaaggtcaggatatcgagaccatcctggctaacacggtgaaaccccgtctctactaaaaaaaaaaaatacaaaaaaattagctgggtgtagtggcgggcgcctgtagttccagctactcgggagactaaagcaggagaatggcatgaacccaggaggtggagcttgcagtgagccgagatcgcgccactgcactccagcctgggcaacagagcgagactctgtctcaaaaaaaaaaaaaaaaaaaaggataaaggatctgagtagacatttctcaaaagagaacatgtaagtggcaacagctagatgaaaaatgttcaacatcactaatcagggaaatacaaatcaaaaccataatgagatatgatttcacccgttagaatggctattatcaaaaaaaaaaaaaaaaacagaaaataacagaggctggtgaggatgctaagaaaaaggaactcatagactgttggtgggaaaggtttttagtgcagccattatgaaaaacagtatggagatttctcaaaaaaactaaaaatagaactactatatgatccaccattcccctattaggtatttatccaaaggaaaagaaaccagtatattaaagaaatatctgtaccctcctgtttactgcagcactattcacagtagccaagatatggaatcaatctgtgtctgtcaacagatgaatggataaagaaaatgtgttatttatacaaaatggaatagtattctgccataataaagaatgaaatcctgtcatttacaaaaacatggatgagcctgaacaatctaatgttaagtgaaataagtcagacacagacagataaataccacatgttcttactcatatgtggagctaaaagtgagcttatagatgtaaagagtggagtcgcaattattacagtcagggaaggggaggaaaaaggggaagaaagggagaggttggttcatggatacaaaattaccactagataggaggaataaattctagtgttctatagcactgtaggtgaatatagtctaataacttgtatgtagttcaaatagctaaaaaagaagattttgaattgttcctaacacaaagaaatgataagtgtttgaggtgatagatatgctaattaccctgatttaatcattacacactctacacatgtgtaaaaatatcactttgtatcccgtaaatatttaccattattatatgtcaaaaatatatatatatatatgaatacaataaaaaataatacaaattttttaaaaaattgatatgtgctcaggccaggagacgagcaatagctggagctatcaggactgagggtcctgagtcacaggtccccactaggtctcaggaaaaaagaaacagctcagctatttagagttgaggcatcaggtaggagcaaaactagtaagggtagcaagaatatttaaacataaaaacctgggctaaaaggctctcaggctcttgcagctaagatggggattggccatggagactggggagggactaggacacatccatgcccaggagaagagggaccgtgacccaagatgggagtccagtagctccagctaaggggtgaaaaggcccactgtgaggccacacaatatgttgactagaaacaggattctggaaccagatagcctgggttcaaatcccatctctactaattaccggctgtgtgatcaccaggcctcagtttctgtatctaataaaataggtgataggaatactcacctcaaaagtgtaggtgaaaattaaatggattggaatatgtgaagtgcctggaacggtccttgtccagcacagggtgtgtgctacataaccatttgtgtgttacacagtctgagcacctactactacttgaaatatattcctaaagctttgtaattgcagctataaacaatcaaaaacatttaccttcaagccaaacaacaaaaagctctagagatgccattcttatgtttatttaaggagtgaatatactgtttgtctatatatgcatcagattctgtgaggggatttcaaaagatgaatctgaaaggatttaaccttccaagctagtagaggagacaaaccctgtgcacaaataattttaatacaagagacagctaaatcccttaggaaatatacaaaaaacgttgtagggttgttcagaagggaaggtcactacaactgcaaggaccaagaatgacttcagaggggtgggagcatcttagactaaggaaaagatcttagtctaaaaaccaaaacaaaacattgccatgatagtagaatcgtttgttgctaatacacacctaaagaaaagcccttaacttggtatgtcattcttccatacgttatcacattcagcttcatgtgcctttatacattttgcaagtatacaaaaacaaaaacactccttaataaaaaggaagctttgctttttccttctttgaagagtaattccagcaaacatttctaaaatagtcctgtgctttttgacatgcacatattggttgttcaaaatgtacacctcccgtaggaaattcattacattttaaattatacatgtctgttaaagcatagatctgttctaccttccatgtatttgttattgctgcttctgaaacttccttacagccccaaagaggtcttaatccctgtcaaatgttattatgttaccaacttttatgtagtcttgaaaggggttgtttatttagtttcagtgactccttgttactgccaaatattatttcatttcagcacagatgtaaggggtccaatgactggaattattttacagccctgacattgtcgagagatggataccagtttaattatggacagctgaaaatgatctaggagtcacctgctacagatatttatcatcattatgaatttctcaccaagctgtggtctgagcactttcataacgttccatttgcgttagacagacagtatgatctatatggaacctatatcttcagtcacctttaaatttatgtatagacagtttaatattgcttattttcttttcctcttctcaaagtgagaaaatatgtttcagtcattcctgttctttttcttctctttttttctgtttctctccatagccccctctcactgctacccttatcctttcagctgtttttccaattatgcctcattggaaattactcattacttaaagaatgtgaattggatagactagacacatacaggatcaagtaatgcaataactacaatatagttggccctaaataaatgcagaaagaatgaaggagggaagggagcagagggaacaggaaaggaggctgtaaaattacagaacactattgatggaattcctccatctcacatttgagaagaaattaatagcatattttttcctctacatcctccccattatacactgcaccaaaataaaatacatttttacaccttttctttttatctctgcttctctctaaagatatctcaatttgtccttttcagattggacaaagggttaaataaaaggggtagccaggttatggccagttgataataaattcaggtcactgtctcactgcccagttgctcctcattccattccattctctgctctcacaacttgggctgtggaatcttcaagaatcccaactctgtcctggatgtatgaataaccataagtactgactttagtgaacatttatcatgcatatgtcattcaccatgcaaagtatttacatgggtcatctcatttaattctgggtactgaattatgaagtcagcactactcatattctctttctgtagttctttctgttctcagttgggacaactttgcccccaagggaacatttggcaatgtctgcagatccctttgattgtcacagctcggtggaatacagggattcgctaaatatcctacaactcacagaaaaacctcctatggtaattacctggctcaaaatgtcaatagtgccaccattgtagatgttaaaaggatgaggtttaaaagggttaagtaacttgcctgaggctctgcagtgttacgtgggaagactggaatgcaaatagagcctgtacttttgcattaagttgcacatatgtagttatggcttccgcaactgattaatcatatcttgtaccaaaggagctaaagttccccattggaatcttatgtgagaacatctcaatacaagtggcccttttcaatcatttgcaaattatctgctcttccatcattttcatcaaatgtgcagaatcgggcccatctaaacagcctttcactctaaacagaaaattctgtaaacacacacacacacacacacacacacagacacacagacacacattggggcaatagttcctctgactttctaatgatataagcaaatataacaagatgtaagataaaagcagaatgtatatcatgctacctaagcaataaactttaaagatagaatatatggcaacatagcttactatgatgaataaattgcatgtatttaatatgacatatttaataataaacatagccccttgtatgctgcaggataattagatagaaatggtaaatagtcatcagtattctttttaaaatgccaataaaaaatattcataatgtttttctctttttatcagctcttcaatatgtgcaaatcagttttgacagtgtttttagatattgagtatattttaataatctgaataaacatcaaaggcagctgtgcaaacacacatattttgtgcacacatggacatgcactcatgtacaccagtgatccccaacctttttggcaccaggggctggttttgtggaagacaattttttcacagagtggggagcaggatgatttcatgatgaaactgctccacttcagatcatcagacattagattctcataaggagcacacaactagatccctcacacacagttcacaatagggtccacactcctatgagaatctaatatcaccactgatctgacaggaggcagagctcgggcagtaatgctccctcacctgccactcacctcctgccatgtggcccagttcctaacaggccatggacagattaggaactggccctaaccaggggatgggaccccctgatatatatcactaaagtcacacaccacatgcccacacacctatacaggcacgcatagataggtcccagatcttacttgccagagcagatttcttttgcctttactcctctcccgcaatacagaattgctgcctcccctttgtttggctccagccctccacccaccctctctgatgcttatcctcctctgaccctggctggaggggaagttccattttcccttcagagcctttcccctgaataagctagtcctagaatgtaacagcaactccaggcagggaagcccaggggtgctgctctcacccctggcctataagcaccacaaatgccaaaactatgtttacccagagccagacaggcatttcaaatttccagattacctcttacccctaaattctaaactgccacacctgttacttattgctcgaaaatacttcatcagccactagttcctttcattctataataaataaaaatctcaaaatatagctaaaccactggtataaataaactttattcaaagtgagctaccaagttaaatattttctattttcatggcaggaaggatttagtaagcaaaaaggtatctggtagctagaagtgggaggggtgtaacagagggattttaaaaggtaacagaaaggagccagaagcaaattctgtattcttcctattcttgccccataccagccctgtttatctaaatccaaacaaagacaagtttcttgtgtggccacaagcaatatcttagcttggaagccatagattttccttactcctcacctttagcactgtataaatctgagtacgccattgttattcaatacatgtatgtaagcatctcctgcattaataaaatttgccaaggatggtgctgaaaaggtatcattcctttcagtttgggcataaaataagagggatagagtgataggatgattaaatgaatattattttaaatgaaatactatatttcacttttccctatcatatagaccttctctgaccaaaacagtagccactagccacttgtggctatttacactttaattttaattttaatcaattaaaaacaaaattaaaaatttgttttttttttaatctcactagcaatattaaagtactcaatagtcacatgtggtttagtggctaccatattgtacactacagataaagaatattttcatcatcacagaaaaactattagcactaatatcaacaaataaaagttggagaatactcattgtttatatgggaagtgggggaacggaccctttcatacagttttggtgggaacaaaaatgctactaacaaaaacacacatgcacttcatagaaaaaaaggaaaactgaaattgtttaaatgtctgtcaatggggagctagttaaataaatgagcaaacacccacacaatagaagactatgctatttattaaaaaccatatacgtaagcaaaacttatcagcacagaaagctgtcctggatgtgtttttatgtaaaaacacaaaccacaaagcacttaatatgaatagtataatcccatttgtgtttgaatatacatatatgtgtgtatattttttactgtggtaaagaacgattatactcttactttaagtaaatttgatcaatcatatattagagaaatgagctacccaaaagaatgtgtgctgaaagcctgtttgcccagccttgtgctagcctaaattgagtcaagctctagcttatggattctgcttctgtttgctgaggtcttcatatatccaaagcaatcctaagttattcacctccccaaaataggttgaatatgaagtcatatgttgtgaatttttacagttactgcaataaacaccatgggcctccaagaaagtccctgaagccaaaggattcttttagtcggaaactggtggatatttggagctcctggagggaaagtgctctcccaggccatctctcttctactacccctcttctctctgcttcacacaaccacagcttgccctttcctctgccacctcactcccataacctgttccaagcaagagaaatccagatccaaatctttacacaacctcagaattcactcgagattgaatatgcagcaggttaagcaatgattcaagctgcttcatatgacttcttgtcaacacacaagggaaatcatacagcaggcttcatgggagtccattctatctctctctctctatcttatatatgcacatatatgcatatatgtataaatgtgcatatgtatatatgtatgcacacacacatacatgcatgcatatatttggtttccatgagagcgcctagggcaattctaagcattgggcttgtgcttactaatgtagggaggttctagagagaagaggaatgcttagaaggagagaggacactggtgtctgtaggtggacctgatcctcaggcaaggaaataatttggctcatttggtatatttttgttggatcaaatcattagatagtaaatatgatgtaattctttgagccaggacaatgataaaggaaatatttttatttcttagtgtgtacagaattacaagctccctaacagaaaaatagcatctagaccccttaaatatcttcacacaatacaacatgaacatggcttctgcctcagctgcactctttgaagcttaatttcctcattcaccaatcattcctggaactgagtgacctttggtctttcagcgtagagcctctctccggtcctggcaggcctctctgcctggagagctgacctgaagaggtcaggagacacaggccttgcctggcaacatttttctccattttaataagtctcatttgcccgttaagactcgtgcttttttgagttcctgattcacgccaagcacatttacttggcattttggcttaaagagaactaaggttttaacccattcaggactatttttctgactagttctggaagcttaaatttttgcctaattactccccaagcactgccagctcgctgctcacatgttctcttatgtctctcatcccccctataactatagccctggctagcttaccccccagtgcacacacatatgcacaggtacgcacacttattttgacatagatgatgggcaaattatctttacagtgctagaatgttggagatttattcttttaattaatacaactaaggccagggaggagaaacctttggagatgttatgtgaaaaggtacatttcctttaaattctgtctctttaattttttcttccctcaaaaacttgtccttcaaacagattcctgaaagatttgtttttcatctgagaccaaactactggctactgatagggtagaattgttaattatgggacatcagaagaaagaattttgaaatgaaattaatttgtaaacatttttctttttccgcctcttttgggaatgacccatataccatgaaaatgttgtctcagattttgagttcagcatagactttcattttcattaattattccaataattcacaatatcattccctttgggagacgcacagaaagaaagtggcatttagagagtcaagccttttcagagcaaccctgggggaggccaagtatgcctggcctctgccattcctagtggtgccaggggcaggctgtgcctttatgcaggatgtggcgcatcaagtctgcctccatgtgggccgccccagggcagttcgggaggaggacaccacccagggcactcctcaaggctgcctgtccaccactgctctctctctctgtgtctgtatgtcatgagagcatgtgtgcctggcaaactggtgaagcccctcatctcctgtctccccatgtcagggcaggacctcactgttactttgatgctgtgccagatttttgtttgaaaccacaccccacagatagttttagacaaaccagtaataactattatgacctgcaaaatacttttctctcaggatgttttgttatgctttgaatacattttaatacagtgaggtaacattcatagactcctagagaaatcacctccagagacatcccatccattgccatgacaccaggcaggcttcacccaaaccccccagacataggtgaatatcctgttttcacaggtcgtcaggaaaagagactccacaaccactctggggtaacacttttcagtgttgacttcccttcagcgctgtcattatctttgtattagagggaaacactagactgccatgacctttaaaaacccacatttgaatgttttgaatcagatgtcacagagcctgattgtcagcacagtatttagctggcattgaaaaatgcaaaccaaatattgacatctactcttggggttggacccagtcagacagctttcactttacagtaaacgcctgacctccatccccttaggatccccttccacgtgggatctggtcatcattaaatggtgaggttctgcaggtgtactgctatgtttttctgctcccaaaaatcacagccatcatgtctctttccctaaattgtgttagcaggagcagaactgccataaaaagcaaagcactgtatttcctagagtccttgcagggatttctgacttgcaaagatttctgacacttggttagttcctttggtttttagaaaaggcagctttaaaggaatcctttctctggccttccccttctgtgatgcaatgcgggaaccccaatgtgatctctatgaggtccagttacattttggcacatggtaatccatagagccttctgcagttagaagaaaataggtacctccctttcttccggctatttcccttggcgaagtaacaagtcaaaagcaactggactggtcaggaaagtcctgaccaagagctcagacaagacacagctccgtgagatgcagtgtgcacagtcattgtctgagaccaagggcctgaaattgacaccatatgcgccccaggagtgattactccaaggggggagaaaagcaacatgtcagaacattttagtaacacctaattcatcccaaggttataaataaatatgatgcttgcttaaaaacaaaagtcaaaaaatacttcaactagattacttctgtgacaatgcttcaggcagaggtgaactttattagggagacaacatgaataaagagaaacacataacaactttttatggtatattttacgtgattttattttttttgcagtaaataaagtggttatagggctccaaggaaaagggcccagatgttagagcgttgtgtgaaatttaggggaaacaagctgtaaaaaacacagtcataaaacaggctgtcagtgccacacatctggacaatacagctgtatgttcctagtggctgtcgtcacccaaagaaaactcaataaccttatttcaccccaattaggctgcataccaacatgatcaacattaagttgcaagggggagcaacattcatatggcgcctttgtgtcaaacagcttttatctttcatttgaatttagttacaaagaaataaaagactgctaacatagtcatttccactattataaaaccctgtttaatttataatatcctaataagtcaaagtttgacagtttggactactggctatgccaaacaatagactttctgtagcatgaatcaccctatcagtcatcctaaaatggagcccagcctatcttttctctacccttttcctggagtctgagtctaacaccatcgtgggaagcactctgccttattggaaaaagaagtcgatattcagacaatccaatttatttaaagtagagggtaaatgcccctctctgtagcattgaggcatttttttccctaacttttttttttcagccagcaatgaagtatctttccagtatgacaaataatataaaatttcctttcatcttttcatcactgacagactgtgccaaaggttataaaacatcactttttctaataattgtgtttctgtataggtgttaacggcagcaaaagcaattatggatagtggagagaaattaaccttaccactgatagggaaactcttgaaatttcaacttctccagattaaatttaaggaccaacagcgacgggaaaatgaaaagaaggtactgtacgatctggtgggttttctaaagagggcaagtggtgaatgaaatggagccaggtttctccaggggcacttcctctcttcttaagcctaccattaagtgttacctggcaaatttggctgtcacctcaacttcttagggaaaggctgtccaaagatctggaggaattatgataaacccattaaaaataggttccgtaaaatatgaaagtaacaatattcaaagcatgtgcccaggattgtttctatggcagtatatttatataataaagttgtagccaagaagggacccaaggaagagacagggagtcgggaaaactaaatatgaaaaggacagttggggggaaccctcacagttcgggtctaactatttaagatagtttatatgatactctatagaagtgccttttaaaataataggcatatctgcaccttcataataatctgaatatttcagcagcaatccatcacttctactcctatattgcacatctgataatttcttcatacctggatttttcatttaatttgcttatagaaatcaatctgtgtgctttccaaagactcatatttgcatatgaaaaatattttaaaatgctgttagcaaactactaccaggttcacatccatgtgctaccatcataacccaaaataagatgtttttcttattttccaaatcatgctgaattatgtttggaaagccaaatacttcagtatatacatatgtaatgtttgtgtgtgcatgtgtatgtatgaaatggatttgcatatgaagtcatttctttatgccttaagtggaaaaggcaaaatcaattcacggaagaaaaaacagaaaagtgaaaatgctccaatagtgccttcttcacctttgcaagacccccaaaatctaggtttcctatttgaattggcccctcaacaaggtaattgtagaaaaaaataataatgccaccttccattttcaatatagggctttatgttttttagagatatttcccatatagcatgttattagtgtggtacatattgtgcctagaaaaattctattcatattaacataattgatagtacagttttccatctagtgaaactctttccatcgtgttgggggagttgtaccttaagaaatactcagggtaattaagacttgacagaagaaaaattggaaaatttgaaactagtatagaaacatctcttgcctgtttaaattccaatgccatatgggaatctgaattataaaaagtagactgtaattcttgcaaaaatttctgcactttctgtttgcttcgccctttcccacagcagttagaaatagtgtgctaaagagcgtcaatttacttgtttaccacttattatgtcactaattgtttatcataggagtagactgtagatttcctttaacaaattttaagtaaaagcaaataaaatattctagtagcttggaaaacgtttttaaagcttgcaacaatataaaaatatttttgcaccattattttactcagcatttctttgaaatgtgaactctaataatacaattaagaggttctaaaggtatggaaataatctttatctgttgaaaatttgagagtcctgggtaactggggcatgaaccttagagtttttattttcttttaagtattagatacagtgagagaacttttgagcaattaagagccaatgattacataatctaatatgacatctccattattttgggttcccaaagcaccaaccccaaatctctgagtcacaaccatatgagtaagtgctaaataaattgatgaaaactcattggaatggaatacaatcgggaaaatactcttggtaaaggggagatgaaggcagttgtttgtgggatgatatcattgatgttcatttcaaccacactgcctaagaggtcagttgaaacaatcaaggttaatgcttgtcagccaaggagtttggcaataaagaaaacaagcagaaagtatgtaaaactgacaccatgctgtggattagaatatgaaaaaaagaaaagaggactttagctaatcttttcatctttcctgaacccacagtgagattccgaaatttctacaaggttagtgactgactcctcaactttttaacatcaacatatctgtgtagatgttgtctttcaaatgttaattaattgcttacctctgtacaacccagagtgttttgtatcttctatgtttaatttttgaaattgtatttttaagaatcagtgcttgaaaaatatccataatagaaattatagaaaatcttgggtgaaagtgagggcaaaaataagtaatatagctaggtacctgttctaatgttttaaggtatcactacatatttgatcctgttttaatcaatcaaaactttttaaaaaaagataaataatatagttttaattgccaaatacagtgaagaaatatcattattttcaactccactacttttaataacattttaaactgggctatggttaacattgcttttgctttctgctttgcaagaaagcttgctgggtaattcatattataagaaatacaagaaagatatttctaaaatgaacagtgttaatgccttcagcatgtaaatttctgggatacaaatgccggcctctaattgcaaataacttaaatctatccgaaaacatttatttatttgaaaataccttgttgatgaactccaaatataaatatcatgaagaaaatgcactgtatttccataaatatattttagtattttagaacttctgaatacgactttctcacacaataattctaaattagtttgattttattatatcttaaaacttaaagtgttttgtttagaaatatattttcttacatccttatcgcaacatttgcttttgcatttttatttctatctgttaataatttatcaattcaacaaacatttactgaaagaaacatttacaaaagcaatgtactgaacaaatatattctcatcatgttccttataattttaaaataaattgtttggtttccattctgatccattttaatttagtcattatctgaatattatatatctactcacatttttgtttctttttaacttcaacttttgtattatatattaattatgaacacatttaaagtcaagacaattttgaacccaaatattttattatattgagaattcaactaaaagaaaacacttgataattaaaaaaatgaaaaaaaagcttcgatacaaaaagtcattaactatttaaataattggccaaataaaatctagtcttaggttcctttgtgtttagttcagaatgtttgtacaggttttgggagaagatccaaatatattccaactgtgcttttaatttatgaattcaaataagtcgtccatatttccttagatgtttttagaaagcatatcttttctataaaaaattagttctttcttttgctagctcatatgcatggtacaaattgccctatttcctgatatactataattgaagagaaggaagataggcggtaaagaactagggtaactttttgtaatactggtaaactattcttaaaacaattcaaaattaaaagtgcctacgtttgataatacatcatgatgaagccacaagcaacccagagcctcctccaaaagagagacaaagagaaatgagagtagttttcacagacaccttccagcttcctccagtccaaacaccgaaacactggaaaccagccaaggtaatgccatttgtgtgtgtgtgtgtgtgtgtgtgtgtgtgtgtgtgtgtgtgtgtgtgttgttttaaaagaaaagccatacggacataccaggaaattacaggctggttagttttgattcagttgtggttaaaatcttcagaaactattttaagaaatcgaacagagaaagagcaggaactcagtttagaaggacccgtgtggtttcaggaaaggaataacttgcctcactaactggatggaattctttgagggtggattatcgaaatgaggatcccactaaaatggatgttgaatctaatgagcttcaaaagccaacaattcaggagaaataataaatgacccccccagatggcttatccataaaatagagtagtcctttcctaattggcttgcttttaattaatgaaaactttttacagacttcaggaaaaatgcaaagaaacatacatctttaacatacagtagtactttaaaatatggaaaagctatgattatagcagctaataattatagttagctatcattattgactatttggcacagaactaagccctttgcacatgttatatcatttaatcttttaaatgactttatgaggtacagagtattattctgagtttgcagatggggaaactgagggtatgaaaagttaaggaattttcccaaggccaaacagctactctcagtggaagagctgggattcaaatccagaactgtcagactccaaagaccatgctcttaacccccatacatatccttcctaagtgtgtctcaataattatgaaatggcactcttggctcacaatcagtagagtgcttgcccagagacatttccctgtaggaccaatggctgtgctcagtgatgtactcacaaccatctggttccattaattacattgcatttaacatcctcaggttaaatagggggacagtggtcaagggaaggaacaaaactcaccaaggaggaatgccctgagctaaccagccactgattccaaaggaaatcctgacttaatttccagtcctgccccccacgcagaaatggctcagtctctgggggaatctcttaaaactggacatccagagattattcctaatgtccttctgcatggtaaggtaggatagcattggctgatctagtactaaagtctttcatagactacatagaaaatacagagaaagaaaagcaaaacatttgcaatgtgtaaccctattataattaatgttaagattttggcatttttctttctgtttttttctgggatttgcttctttacgcagctgtaatcattgtaaaaatgcacccctttttcagttaagatagattataatttctactcattatcacagtgtccactctatcattattactggttttgtgatgttttattgactatcataattttcttaaccatttctctatcattgagcatttaagttatttcaatttcttttcataataaaccatgtactttgcagtatagaagtctccatattttggataatattcttagcatagatttattaaattggattaatgtttaaaaatgttcccataaccttgtatgttcaaagtgagccctatggccacttagacctagttctccatttaaaaaagaaaaaatggctcctggtcaaatgagcatggaaatcactgtgtattagatacaactcttgaagatatttaagaacataatagctaattaaagatgaaggagttttgtgaaaaccactatatttaatattgtttaacctacggtctctcaaatttatgtgatcttatacctttgtttagcctatctcttgtcccctatgatagcttgtttatgagatagggtgatatcttgaaagagaactagaggaacactcagaaaacccagtttctcataaactacataatagagtgaattagttacaaactctgtgagtatgttttcttatctatatcctcaacaatactattctgaggatcttattataaattttatatgaaacattgttatacatgaatatgtatatgcattattattattattattattattattattttgagacagagtttcactctgttgcccaggctggagtacagtggcacgatctcggctcactgcaacctctgcctcccaggttcaagtgattctcctgcctcagactcccaagtagctgggaatacaggcacgcgtgccacaacacccggctaattttttttttttttttttttagtaaagatgggatatcgccatgttggccaagctggtctcaaactcctgacctcaggtgatccacccacctcagcctcccaaagttctggaattgcaggtgtgagctaccacacccagcctacattaggcaggagaatcgcttgaatctggcaggcggaggttgcagtgagctgacatcgcgccactgcactccagtctgacaacagaacaagactccgtctcaaaaaaaaaaaagaataagatgaagtatagatatatatcatcagtttcactgacatttaccatttatcttcctttcattgtaaggaattaggagaatgaatacttattaattatatttgaattttgacatcaagaagtcatttagaaataaaatatgatctaaaatattttgaagcatccaataactaggttgccctattatagagaaggagaattttttatttttccctttaaaaagtgagaataacttaagattaagtgttctagataggtgtcactttatattcaactgaatatgtgaaatgccaacactttttttggttattgctgagacaagaatctcacatatgctatgtaacttaaccggttaagaaatctctgtgcctatccaaagccgtctcacagtaggaggcatctagatgctttctgcacatactgcattaaaaaaaaaaaaaagtaatctgtggcaaacttgactcttccttcatatgctggggaacatgtgttcctcaaacatcgtggagagaggcactttttggatatgcccctcctaaaatttgccttgaattgacaagagttccctctgaatttttaaagttgtgagctaatgaccttagtatgggaacatgcatgccatgttatccagaagcaagaaaggccagagaaagagtttgtatgaactaacttgagtttataacttagggggtcagctttgctgaatgcgcctgatctggttaactccattcccactcccagatttcaagacataaacccataagtgagaagggtttactcagaatgtgagaaaaaggaaatgaaagataggaaatgattttcctatgattggggcttggtacaaaaggatatttcactttgaaaccaaggtagaattctaggggccaaccagtcaatcactctccagaattaaagggacaaagagactgtcctggttcaacttcagtatgaaggatgggaggagtgagggatagactgaatccaggagaggaataagtagaccaccattatggtcagccatggggagagagcagaatgcactgggtagggtaaagaacatgttcaaaaatccaccaaagacatctcgacctggatccggaacccaggaagacctaggtacttccattcagttttattgtctacatatattttctctgcaccagagaatcctttctttacccaggaaattctttacatagtaatacatattctaccaactgaagatataacactgttaaatggaaaaatgcaggacaccaagttatatagagagaacaataacagttatgtaaaaatgatgcagaaagttaattcaaaagaatgcattgcacatcttcttcactcatcttccccaagtggtagaattgtggtggcttttgtaagctctttatatttttttccaaatttttagtaataatttttataagaaaaagttatttacagaagtaaataaggatttataagggtcctctttaaaaatacttttagctgggcatggtggcatgcagctgttgtcccagctactcgggagtctgaggtaggaggatttcttgagcccaggagtttgagtccagtctgggccacagagtgagactcatctataaaaactttaaacatttttaatacttttgcgaaggtgggggaggtaaatattgataattttaatgttaatggaaattagtttaaaatatactgttctccagtctcccaagtttggccttgctagaggaatgcaaaggcaaaaagaatgggagagaaaggagaagtgagcagagagagaaagggaagtgagcaggatgaatggctgaggtgggtggagtgctctggagaaagaaaagggcatcaagcaagtgtgattcagcccctgggaagacagagtagagggaggcagacaggtatggagaaatcaggagagcatcaaagacagacaagagtatcatggaaataaaatgagtttagggtttgaagtcagaccagcactctctaccacagttgtgtgtcttcggacaaactctgtattaatttataaaatggggataaaattacccatcttacaggttgccttgtgagatcaaattaaagatgatgatgtctggaaactatactctgctactagaatttagcacttcctttgaatgtttggttgtagtccgccctcctttctgcagaatcccagaatcccaagaaccaaatagaagaaagggccagagagttcctgagcttctagaactccagtctttgctaaaatggcttcaaagggatgagacttatgtggctgcacaggctctcacaccctacctaggagaacctggagggccagagggcctcttactgtctaacacatgatggggaggagtatctgtgaaatgatgaaatgaatgaatgaatgcataaatgaattaatgtttattcttccaggtaaactttaaaataatttaatctaaaatggtttcatctttttagatcaaaagatcaccctgagattttatttaaaattgcagttgtaaaagtttctggtatgtttttgatggctacattggaacttttctgtagcaaggccagctgtctaccaacatgttgcacagggtgttgcaaattagtaaatttgctatgatccaaagcttggctgttagagagccctgcatgagtcttaccagtgcttccaggccaactgcactcaggggcactgacttgtgccttacaaacccattaaaaaagagcatgggtgactggcctggctttgccacatattagctttgagtttgaacaactacttgccctcactaagactcagttttctcctccgtaaaatgaagatggtgctctacctattgtagttattgtgaagacttgacgagatagaatatttggactatagtaagaatgtaataaatagaaatgtaatattgataatgataaggatgataataatagtgacaatgacagccatgattagaatagccccttgctaatttactacagtaaatattactgtcagttttgtgggacagacccatcagcattaactgaaagttttctccctgtagacaaattgtacataggaaggcaaactgtcagaaacttatgtagtacctcaagtcttaactagggagttagtttaaaggtttacagtcctgatggcctgatgcagccccctgaccacatggctgtaactcccaggttacccagaccctcctatctgtctatcaggaaatctctgccctggacaatttggaattaacactgttattctctgcctctctgatttctctgattcttctttttttttcttttttgatgttttttattactgagtaatgctcttcttactggcctcttagttctctaatgattatttcctccactccacctcagccattgcctcccttgaaccttgtcatcactgaagccctcatcacctccaaagtcttgagatgtcctgttctctaaccttggaaatttcctatccttgtctcttactcataatccaatatcctcctacataatttcttcaaccacattataaatcccagtccataaatcccaacactttctattcattgtcctctcctgctatttgtttggcttaggttccatgatccaatcagtattatcgtttctctgcttactcttgattccccttgctcttctctccttccatcacaatcatttcgcaaaacccctcccaggatgaactcagtgatccatcattttcatttctattcctgagcagctaaacataaatggaggaattcacacaattaaacagactgatttcatgtaaaattaacaatctcaacattttcaataagttctcaccactggcagagtcctaccatattacctcggtaagcttgctcccccactctctgacataagataactcttacgtcatcttccctattcaaacctcctgcctctttcctgccttttctcagttgatgactttgcctcatgcttcacttgaaaaaattgaaacattttctcaacaccatcaagatgtctctgtttctggcacccagcctcttcctgttgttcttagttatgaaactaagaaattccctctccttctatcaaggtccagtcattggcacattcttttgttcttatcccatgttgacttctagagaacttcagtctcctcagccccgtatcttcactgtctccttctctactggatcattccatcagcctgcaagcataacatctcttgactttacatatatacataccttgacctcatacccccttgcatccactcacccactgaacaactcagagctctggttctgcttcacaaccaaacttccagaaacagttgtccataaaagtggtttctctattgatactgccctcctattttccacctccacactccaccataattgctcttcttcatgttacctacaactgccaattcttgtctttttgacctttttggtttcttagttctctagcttcacactatatatttttccctatctttttatccacttcgctgtctctttctgctggcatctctccctatacccattggtaagcattggagtctctagcatgatctcggactcaattctcatatttctcaagaaacttcacccatggtgattcatctcttcccatgcgattatctactatttgtatgttatgcacacctgcatttgtaactctagccaaatttctcttctagggagagaatgtgtgtattgaactaccttcttgacctctcaagaggcatctcaaagttgacataacactgttaatattctgtccaccttaagtaaaactcatttatcacccagtcttctctatctctgtgacaccatcaaccacccagttgctcaaactaaaatccacagcactatcttaatgtaccttcttattcagacttcatatctaatctttcaacccatgaagtttcaatatccaagatacatctcaaatctatctttcttcactctgccaacactttaatctaagtcactattgggttttctctggactattgcgagagtttccttactagtcttctggtttccaatcttgcaaaatcatagagctcctctacttaaaaccctttaaaatcttcccattgcattttagttaagacataaacttgttatttctacctccaaagccctggatggcctggcccatgctgtgcctcacacacctcatcttgggctactctgcacctccactgctaatttccctgctgggctcatctcctttcagttcttggaacacacgcagcctcttatgccttaggatcttcacacacacacacacacacacacacacacacacacacacacacactacattttccctgcttctcatgtgtatgactcttgcctttgagatcttcgctcaaatgtcacttccacagagagtccttcatcacctacttatgaaagtgttctcaattgtgtttctataacgacactgggttttattcttcatagcagtcacgaaaatttatagttacatttttatctgtttgtttgtatttctttttctctttctttccccataggctgtgagctcaaggggcagagccgagccccattttaggcaccaatttatacctggtgcagagagaaatgctaggaccctttcactcttctgtaccttacctgtgctctcgttgctgcctctacccagtgtttgtgagtgatacctgcagcctttactgatgtttccctctgctgctgaggaaggctgggacagaaactgaagctcataaaaatattcactgaatgaatgaatgaatagatgaataccagcatcccatacattttcagaacttccattctcattgaaattctattgttaagattaccgcatttgtgtcattggggatcgactaagggagatgtgtgtaaagcctggcaagcttgactttggcaatgccctcttttccttccaatcccctttttctgtctggcatggagcggtttccctggacctccacttccactccagggatgtattttcttcttcgcccctagctcttcaaaggagttaattttaccatttacatatgctctagccagttggatttttcttcactttctagaaatgggtgaggccatttcatagtctgtacctgcctccaccccaggctgtgagtgacacttgaagcccctgctgatgatgtccccttctgctgaggagcaggtacaaagggtggcagtttcatcaccactagagccataggtgctagaagccatgggcccctctgggtgccaaagctaagagcccttaacatccagaagccacatggagtagtgtaggggaagtgctcctctccccttctgcgttacattctgttagctggatgtcaaagcaacatatcttctcagtactgccacaacatttcagtgagtacaactaatttgtattaataaacacatgaactgaaagtgtaattacattatgaagtactgcacaacatttttggcaactgttgggaaagaaagaaaagcggggtgttggggcggaattaatgtttacatggtacatgccaatctaagcatgccccagagcatcatggaaggaattcatcttgccaactgatgttttattctgaccccatctttgaaggcatcaaatagcaaccattggttatgtctgcacattcttcagtaggattataataaaaatacttagttaatgctaagttccccaaataatcttttaatctttatttaaaaattggtcaatacattacttgtactatgaaatgctttatcaaggagattttagcaaaacatctattttcctttttatttttaattcttgttttgtttttaataaccaaccccacctctctctgagactcagacagaggctccccagggctagactaaaagataaacctaaattcctgacaccattatgtactcagaattatcttcccgccctgccttcaaaccactggggtggcttcttaggccacacttggctctcccataggactgattctcttccagaagtctctgtgtaaccagctttctggcacccactcctccagtcctcatgcataaatgtgccttgtcacaacttagtctcaagctggaatctccactatgctgacttatataatgaatacctaaaaaataaagagtatacaagtgattgaatgagatgaagaattaattcacctggcagtagaaaagccattgcttgctcactgtttgatttggagaaaaaagtgttctctcattccaggtaatagaagacaaacctaagttagaaaaggataaagggaaagcaaaatctcccaaggagaaaaaggctccaagtgccaagcctgccaaaggaaagggaaaggatcagcctgaggcaaatgcaccagtgaaaaagaccacccagttaaagcggagaggagaagacgaccacaccaatcgttacattggtcagtaaggtgctgctgccggcggtgcctttcacgagtgaaacacagtggcaataaaatgagaccagttaatttggtgactcacatagagcgcatagtttcctgacgccaattcccccacaatcattttgccctagagacactagaattttcctgcctcatgaactgtgatgcgattggagcagtcatcccaataactatgcttagtctttcccagccttttcactcattagaaacataaatcacttactcccatgacaccctgagagaaaaagacttctatttgcaattcatttgtgtctgcaagcaaatttttcttgagacagggtcttcctctgtcacccaggctagagtgcagtggcacaatcatggcttatactacagcttcaaaatcccaggctcaagccatccttccacctcagcctccccagtagctgggaatacaggaacatgaccatgcccaacttatttacttattaatttattttgtagagacaggatctctctatgttgccaagagtggccttgaacacctgggctcaagtgactctccctcctcagcctcccacagtgctgagattacaggcatgagccactacacctggctctcttaaacaaatatttattaagcatgtgtcttgctaggcacatttacacagtgcaaataaaggctgagatagccagttgactgtgctgccaaggagcttactatcttgttgggcacatataggaaagtcagacataattataaagcaaaataaaaagtgattatggtcatgagtgaaacacagtggtaataaaatcagatcagttaatttggtgactcacatagagcacatagtttcctaccccaactcccccacaatcattttgccctggatagagacactagaatttttctttcattttagtttcttaatataaaaatgattcatcctaggcagctgtaagtaattcattcctgccttcccttgaatgcaaatgagctacctgttgttatctgcatatttaaatgagatagcagagggctttcccatcctttaccagttgactcccctcatgcatctctgctctaaatccagtagacttggaagaagtgatattatgaagtccatgggcaatatcaacattgattagtttagtgatagaagaaaagtcataacttaaaaatgaaaagttgtgcctctgttgcactatttatatattgatcttaatgggcttttgtgaaatgtagtgcttttttgtaccatgtgctatcagtattaaagtataacaattattcttaccctgcagaatgtcacattctaaaataagatcatgtcttaatattaataaaatagtataaccagggccaaataaaggagaaaaatgttaggaaagtaagtgcacactatgtattttaaatttttaatgcaataaatacatagttactacataatccatactcgggattcacacccattgacataagtgcatacaacactttttaagggagcatgtccatattcattatttccctctcctgtaaacacctctacttataaaataccacaaagctgtagctatttctaattcaggagtaaagccagatgttgctcaaaagagattagaacccaaaaaagttacaggctaaactcttaacaaaaacccaagcacacattttatatgaccacaagccccatataggtttgtccttctattacgcctatgtcgcatttgcaaaagtgatttaatattttgtaaaatagtcacagccgtcttactggaagggcaataatgaaaaacagtcaacatgactgcattccagccaactggatcatttttggcaagccagagggattataaatgcatgcataatgtatatagccattgaactggctgagtgcaacctgctctcttttacaatgatggctgctcttctttatggtattttgaacagacgatgagccagatgatggtgcccaacattacattatagttgtgggctttaacaatcctcagctattagcaattatggctgagcttggcattcctataaccagcgtgattaaaatatcttcagagaattatgaacctctgcagacacacctggcagcagttaaccagcagcaggaagttcttcttcagtcagaaggtatgcagtctgctacacaacttactgagtccttcaatattacccactgtccttaaagtacaaatataattttctgtccaaaacatagtcttacaattagtacattattaaatcttttcaagactttgatttgccatttactctgcttgcaccagccaagtgttgtaaattttgcaaattaaaatcataccctgtatttatatcccctgtatcataccctgtatttatagccacagaaaacagactgcagttcagaagacttggttatccaactgccttttctggagtatttgatctataagttttacctaaaggatgcgctggatgaatcactgttaataatctgttcttgcagaagtcacagttcaagtagcccaagggaggtcacagccttagattcttgccctgttctgctattgtcttattatgagaaatcactggggtgctatcttcctagccttagactagcaagttgtgggatgaagttccaatcatgctaccatttagccattttgagccttgaggtcttcatctaagaagattatcctagatgacttctgttgaagggaagcaaaaagccactgtatactttaggaaatagaactagaatttggtgtaagattgtgttaccagatgcccaagttttttctgccatatgctgttgcttttattgttatttattaataatatcatttgcacagtgttttgtatcttatgcagccacatcccaatttttataacactacatttttaaattgctgctctataaagttagaaatagctacccttgataatactaataggtctcatatattgggcacatgtcttgggactaggctcaatgctaaggacattaagtacattgattcatgtggttttcacaacaagcctaggaagtatgttttattgtttccattttacaaaaatggactctcagtctagaggcagctattaagttaaaaagttgaggttcaaacctaggctattcctgatgatctcaaaggatagttataatactaaatggtttattattgaagtgagaaaatgctgcataagctccaaacacagtctctctgtaaaaatatttaatatataaaaataaaatattaaaaaatagactttataatagaataatgagatcttagtagtagaaactactatttaattatagatgtaataagcataaatatttcgggcaaatttttaagcataattttatggaaatctgtcattattttacagtaaaagtacaaatacccagagaagcctattgctatttaatgtgaccaaaaggtaactgaaacatacaacattgatccactctgttttcagcaatataagaaggagaaccagataaactgcatttgtaatcagttatgtagcagacactaagttgatttaaaaagtgatatggcagaaaaactggtcctatgtagattgtcatctaagagtgatggaaatcttgaacatatttagctcccaaaatgtgtgacgtagtcataatcttcctgggcctcaactataaaatgaaggcatgagataagttcatatttaaaatgaatctcagaaataaagttctctgatttcacaattgtatactccgacttcaaaaatttatcaaaattacattcctttatttacattttctggtactgtacagatatcttgcaatgcatatgactcaccatgttcacttaaagtgggaaaacatttaacactctcatttggtaatataaacatgttgctattattagatctagaagcagaaaaattgaagaaagaaaatgccataaaagagcttaaaactttctggaagtacttggaaccagtcctgaataatgagaaacctgaaacaaatctctttgatgttgctcgacttgagtacatggtcaaagcagctgattttccttctgactggtcagatggtgagatgatggttagtacacacattactgagagtgcatggttttaacatgtgacacagtggttctatttgctccatttattcatcacatagatagttactgagcgctgattacaaggcattgagctaggctcttttatcttcaggataatgataatatggaatgctcaatgatagttatagtctgattcattagcttttagtgtgtgaattaacaacaaataataagatgtagtagatgaggatcaaaaggatggtgattcttttatatggtgacacgtggctttgttttaaaactcaacaatgttctagacagtaattagaatcttcatatgtattaattttaaaatagtaaatttcatagtttgttaaattacatgtctgactttttatgtttcagttcatacattgcttttctaagcccttgcttttattcccccctttttttttttttgagacagtcttgctctgttgcccaggctgaagtgcagtggtgtgatctcactgcaacctccgcctcctgagttcaggtgattctcttgcctcagcctcccatgtagctgggactacaggcacgtgccaccatgcccagctaatttttgtatttttagtagagatggggtttcgccatgttggccaggctggtctcgaactcctgacctcaggtgatccacctgccttggcctcccgaagtgctaggattacaggcgtgagccaccatgcctggccccaaaatcttatttttaatatatttggccaagaaggtctatcctaataggatgacttgactttggccctgtagttatcaggcatttcccaagagtggggtttactggcccctgctattgaggagtttgcagagaggcaagactaaaaccgtgaaacagagaagcagtggtcaaggacccacatatctggtgctcagttatgtgaaacatactctaagtttcctactaattcagacaaagaaaaaatggaatgattggaaaagtagtgaatgacagatgcatgatggctttttaacaaaacggaaggtcaaatgactacttatcgaagatgttgtggaaagtattcaggcatccctctgctacagaaaatctctcaggtctctttctagttgacccttatcccaactaacaggggcctcggagtgttgaataccctgcaggacgatatatttcagcgttaagggagctgaaatgaaagcaaagtcctagggaaggaccatatcaagtgagtgctctgaaaaaggctgggcaaagtggagtgtggagggtggatgggtgtctgcacagtgactgtgggtagctgacaagaaaaaaaaaaaaagccgactgtctaaaagaagagtgagatcaaagcctggaactgtttctacagctgagggtaggctatggggcatggacacttctgactctgagtgtccctggttctattaccttgagatggatatgcacttaatgaagtaagtgaaaacgctgaagagggtggccagacttgaaccctgaaggatggacaggacttgaataagtagtaatggagagatcagtttgagttataaagactctcagcacaaggcattagatgtcactatgtagaaacaccacacttaagtctgatatcctggtgaatctcagccttgttctctgcgtggaaaatgaagctgaatgtagaaaagctgtgatagaaggcagagctggttctgggaaagactagagactccaaactccctttgtccttgcccctccccaccccttcatctagatgtgttcagctttcctgctttgtcttccactctcctgcctcctaaacctgacctcagagaaggacccactgtcctctgtccttcactatttcatgttgccttgggtcagtatgtttccctatcctggagatattggcattccaagtaacatatgaacattccaccctattttcttgaaactctagattatactaaaaaaagtgacatatttagggggaagaggctatttccttgggatcctgaaatcccacctcaaatccagcttcttactctctcttccacagaccagctgttctcccaagcatgtaaaatctctggttaataaaacccacatccacaaatttaaattttggagaaacactgctcctctcatttgggccaaggcctggctacataccctatcaggaacttgtgtatattttttgttcaacaagacacaggagatcccagccttataatccctgaaccataattcattcagaggaggctgcttctaagtcagcctcaagccaagtaccttttgctccatctctagctagggctccctactgtgtgtcttctttactttccaggcacaggctgcataaagctgaaatgcagagtctaaaatcgtgtacagtccattgcatcatcagaacatagatgtgaacactgtggtatacaatggcaacttcaaaggaccgagcaccatttctagcactctgcttctcactgcagtgtccacattttaatcacttccttttaaagaaagtggtagtggctatattttacttttaaaaatacagaatggaacagtttaaatggcaattaaagttcagaaaaattattttatgtggaaaaatattaccagtctagttatggtagaacattcctgacttcagaattgaaacattaatgtaaagggtctctagttgggccatgaaggtaactgtcaacaatgaaaacattcaggtctctacagagccaattaggtctgtgttgcccagcttcccagactgatctattagtcaatttgcaggtatttactgaatgtcatcttataccagggctgtggtctgggtccaactgtagtaatcttttaaagcccatgcatgcttctgtaagatatggtttgtgagtgaagcactcagcattgaggatgatggggagggaaagtcttgaaaatggttcagtcattaaattggattctagaagaaaaggccattgaatttaataggtaagatcacagttcattttaaacaagatcatttaataagcataaaaattataatctacccctagtagaagcagatcaaatgcatagtgtcacactttaagctatatctgtaaattgataatggcttcatatccaagataggatccatccaaggagccctcttcccctttgattggcggaaagcatttgcaacctttccaacctttggctgcaaacaagcaggctatatttctgttgaaccaaggtaacaaaagctttacatcaaataaatgcccttcaatgcatgataactgtccctggaagacattggcaacatttcaagttaagaccctggttgctgaaataatttgttgtccttagcatgtgatttgctgtttcattttaaaatgaattaactaggttaagctaagggatcattgggcaaaagctttctctatttcctagaaataaaaacaaaaacaaaaacatatttctatgccagaatttgggcaagcaataccagattgaagcttgactgaagaagccttggtcttagtgggaatgggaagccagccagcaaccaggtgcaccatagtgattggcagagctgtgcacgtcactggacttctgcatacaaggaaccatctcataccaccttacttcttgaactcagacataggatgagcctatttcattcttctttgcttccaggcagacagacccagccatcacaatgctttcctacttctggaaacaaaagcccaagtaatagaggtatctgagctacaatttgcttgtcagctcataaaacttgtgggtattatagaagcaatagtctattaggatttcttagtgttttgctgtagaggtagaacaggtgaaaggaaagaagtggagcttggaggaaaagaagaaatactgattgcccacatacttgtgtagatgcaacgtacttgggtagatgatccacaaagcagagtcagtgtttccattgtgttccttgcatagccaggtaagaaatcatctatagcttgtcactggctgaggatattaaagttacctaacgtgtttaggatttgagatactaagaatacaggccacactgctgaaactcatgactcagttatatttcttttagttgaagcattaattaggctcttaaaacattaggcagccatacggccctccaaaggaaacagtccatattgcggtaaacaaagaagaagaagaaaggttcaggaatataaatggggtcaccatggttgggattcagtggtttggagatttaggggtttgctttcctgtataaagttgatgggcataactgttaagagatatataccatatatctgattccaacagtgtaaaactagtaaccaattgccattaaatctctcacttgtagctgaaattgggcactgatatttttgaaaatattgcctgcttgatgtatgacatcctggattggaaaaggcagcaccagcactatttggaaagcatgcagcttattaatgttccacaagtggttaatgagaaacctgtattagaagccatgccaacttcagaggtaggcatgggctcaatgtctttagtgggatgaatgattcactgaacaactttattttcatatttataaggcatatgaagaaaaagttacataaatacttacattaaggtcatactgcctactggcataaaagatagctacatgatgggggctttgtgaagctcctcaactaccagacatttacaaaggcaaggatggaaccttcttgtcagcacttggtacaatgaataacatctgtgacaggaaagatattgacaaagtaattgcagtatttatttagcacctggctatgtgctagagctgtgcaagatgctggcaatacaataatgaaaactcattccctgtcctcctcattgaggttaacttttaaagaggatggcagtcaagtcaacaatgatttcaacgtagcatgatgaatgctgagagcagtcatctcagcttgcagtagaagaaataaacttggtcacctgatctaaacaggagtagagcaaagagagggaagtcaggaaaactgaaccaggattagcgatgtggggaaagatgagtatgaagtgcctaatggaaagcatgataggggaaagggatataatgatattctcaagacaggggcaaagatgtacaaagatatggaggtcaaggaaaagcagtattatggcacaagccaggagcacagggtagttcagtgatcccaggctgcatgtgcaaagtgaagaacaacaacagaaactaaacctggagaggcaggagccaggtcatgaatctcctttggtgctaagttgagagtctggtttatatcatgtaggcaatggagaactgctgaaggattgggagagggagaatgggatgactctgagtcacccaggggaaaaaagaaaaacctgtttgatgctcagtgccccatcaccccatcactttctccacaattgctcagtgggttctggtaggaaaaactgaataatgtctataccattaccttctttccttcatcaagcaaaactcttttcctttggttctaatattagcagatgattttgtggtgtgaacataattatacaacctgagtatcctgttggatctcatcataccagcatttgatgagggcatctctcagctgggtatctcagttgtttctttttaattattctttttctaggctccacaacctgctgtaccagctcctggaaagaagaaagcacagtatgaagaaccgcaagctccaccaccaggcatgtatgaaatcggctgctggaggatcaacaccatgagctggcactttaagagataatgactgccctccatattactttcagcctcccttcacctacagctcctgcatttattagtgcatagtcatagtttgaaattatgcatgaaattttgatggaaataatggagaacacaacttaattgggcaatggtattttctatattttacagtgacttcagtcatcacaactgaagtagacatgagatattacaattatttgctgaatccaattcgagaggaattcatttctgtgcccctgatactgcattgtatgctggaacaggtggggaggctttttcccaggttgtatacttgagtaagtcgtttcatctttcctggcttctgttatttttacactattttaaaattatactcataatacctaagtgcattctcctttataaagattagaatagttcagatgaaactaaagtctgcttaaatcttcagcttcaattctcttttcttttgctatgctctgaagccatttatgtaacattccctgaagttttggtagaacatatcctcaatactctgtgtctggtgtcattttaatggaagaggaaaaggaagagaacatggacaagtgggtgaggttgttaatagtctttatctttaaaatttctttcatgcttgtagatttaactagatttttgtatttctgaggccaatttttgtcatcagcttttttcttaatgaatatgtcttaataagtattttactggagttttaaatctgatacaatgtgctttacactattcacttaaatatgttttaaaatttcctctgtatctggtcatgtacctttcctcatgactgatgttatttatttgtgctttccttttcttgatcatgattgttaagggcatagctattgtattggtcttttcaaagaaccaggatttggtttcattgatcaacacctttttactttttattttattaatctcttcattaatttcttcatctatttatttatatatttgttatttatttaattatttttaagacagggtctctctctgtcccctaggctggagtgcagtagcacaatcatagttcacaatctcaaactcatgggctcagtgttcctcccacttcagcctcctgagtatctagaactacaagcatgcaccaccatgcccagcgaatttaaaataatttttttggagagacaaggccttgctatgttgcccagtatggtctttaactcgtggccccaagccaacctcccacctaagcctcctaaagcactgggattataatcatgaaccaccgtgtctggctcatctctgtcatttccatctttctactttctttggatttattttggatttcattttaattgaaagcttacttcatttatttttagtctttttgctttatttaaggctatacatttcttttcgagtgtttctttgtttgcatcctgatgctttcagtgtattcaattctaaatcttttatttatttacatgtttaacccatgaattattttgatttccattatttactgatgatttctaattttttaacattataatcagtaggcattttctgcaagttagcaaattcaaatttcctgaggcttcctgtgtgacctgatgtaacatggtcattgtgaaggttctatgtgtatctgaaagagtttgtgattcatactagtagcacatatgtagcacttacaggcgccaggcactgttctaaatgctttcaatatgttaactcatgtaatcttcagaacaatcctatgaagtaggaactgtttttatcccccattgtattagtccattttcacactgctgtaaagatactaccccagactgggtaatttataaacaaaggaggtttaattgactcacagttccgcatggctggagagacctcaggaaacttacagtcatagtagaagggaaagcaggcaccttcttcacaagacagcaggaacaaactaccacttttaaaaccatcaagtctcatgagaattccatcattatcataagaacagcatgggggaaaccaccctcattctcccgtcacctccctccctcgacacgtggggattacagtttgagatgagatttaggtggagatacagagccaaaccgtatcacccatcttacagataaggaaactgaggcacaaaaagtttttcaagtttgttcaagtaataagtagcagaaatgacttaaaacctagtgaatctgcacagaaaagtatttggatgccatttctgcattgtcgtcttccttttaatgttgctgttaagaagtctgatgtcaatctgatacttttttctttgaagataatctttacttttctttctagcagctgttagggttttctctttataattgataacacaagactatgtctaggtatgattttatcatacttgtccttatggtgtaagggaattatcatctgatttccagtcacattctgtgtgaaataaaaattccttacactgtcccataaaggccctaaaaatagggttctgagatgtacctgtcatctcacctcctacctgccaccacacacacacacacacacacacgtcatctacataggccttctggtttttcctcaaatatgttgcttaattctatcttaaccttttactctaccttctctgcctagaaagctttctctctttctggagggtctccagtagaagtgtcaatccttagagaggccttctctgaccacctgatctaaagaaccctctccccacacaacacacagcactctctaccacatcaccttgttttattttcttatcaacagcttttctttttgcaatatattgatcagctatttttttcttcccttccccgtcctcctactagaatataaactccatgcaagcagtaacaatgtagtcttgttcgttgctgtatgctcagcacacaataaccacacctaacccatagtagacactaaatacatatttgttaaattcagaagattctaagaaagtcttctatcttcaaatatcatttttcctatcgatttaccttaattattattgaatgggtgttggagtttcagggtttttctctttgtcttttaagttttctttcaattttatccctttgggaattccagcttaacttcctactaatgctttcttcagggagtccagtctgctattgaagttttgttttggcagtaatgtttttaatttgtaaattctctactttttttttacaattgcctattcttgtttttagtgcatggatgtgacacattttttctgttaatacataaaaggtttattttaaagtccttttcagactctatcatctctgatacctcccatatacatttttctggtttttgattgtcttagttttctaaccaattagataatcacactaatatttgcctttaattgctccatgaagtttttagaagatcaatagttttattatatcaataaatgataaaagtacaaaagctctctagaacttgcagtatcattattttatttatcttatcctttcttgttttattttactaaacttaaagcaacaaacatttattaaccatctactatgttccaggtaccaaagaagacagttaatgagctcggcgcctaacaaatagaagtcaaccagtagatccatgttgaatgaacgaaggcttaataataataaggggatgaaaaaactgaaatataggagtgatgggatgatactttataggatgggatgttagaattggacatttcagagaagaaacagatttgagtgatcttttatgattgaagtgggtcaaagaaatgatcagaggatagaaagtggaaacagtgagtgactcttctgacagtagggtgtttctacaaggtaaagaataggatgcaattttgttattctagagcagtggttctcaacaggaagtgattttgttcccagaggacatttggctatgtctggagatatttttggttgtcacaactggaagggtgctacttgcataaaatgggtagacaccagggacattgctaaacatcctatagtgcacaggacaaccccccacaacaagtaattatctaggccaaaatgtcattaatgccaaggctgaggaaacttgtagagggataggaaatcatagaggatgattataggatatagggtaaagggaaaagctgtaaattaggtgcctaacttgattatgtttcaacctcttttacttgtttaccatgaaaaattgaacaaggcacttaatctttctagacctcactttccccacttaaaggagacactattacatttactgatctcataatctaataacttttctatttttgaagaaagaatgaggattgggcctgaaccccagtttcttccactcaatatccttgagctttggccagtcaccctagttttctcctctatacaatggaaaataatatctgtccccacaagattgctgtgaggcttaaatgatcacatgtgaagatgtgttacatagtacctggcttgtgatagacacttaataaatatttaatgaatccaaagttatatgagcactctttccactgctttaagatagagtaaatattaagaaaaaatgttattattctatttgactagaatcttcatgaaatatttttatcaaaaacttattgttaccattttcatgttatctattttaatagaaatattaaatttatatctaccttaatgcatggattgcgaacacttttccttttacttggtgatcactgatagtttcctgccattttgtgtcatcagtggtacttgggtcccagaaatggactggttcttactaagcagtgggaatgcagcaatgagcagtgagtatcactaaagagcggacccttacaccaattcctctcattgttgatttcaacaggttgttgcaactgaagaagatctcgtcccacccagtctgcgggagccatcccccagagcagacgggctagaccacagaatcgcagctcacattgtgtcccttctgccctcactctgtctctcagagagggagaaaaaggtcagatagcctgagatagcagagtcttcatgctttggaaaagtatagatcctctctttaaatcaatattgtttcaatttgcatagaatcttcatgacatatttttatctgaagaagaaaatgaaagcaaagcagtgcccaaaggccccctcctactgaactatcatgatgcacacgcccacaagaagtacgcactacaggtaataataatcaggttagcccaaggaaaaccgatgtgggaaagtgtgtttataactattcagttgaaagaagctaattagataacttcatcaacactaattaaaatgtaatgtacaaaatagatacttgcatacaaagtaggacctggaaaatggacctagatacagggaaaaatgatgtcagccgaggaaatttgcctgattattgaggtctaattaacaattcaattaattgttaccaccactaaattttcattaaaaccttataattatttgcttcaaatatctgctgctatgaaaaactagtagaagccagaaaaggatctcaaaagagagagatgaatatatatgagactttggcagtttgtcactgtgaatgaagaatcagtcatttttgtgcaccaggaaatcctggcaacataggaactagctttttgaccttcagcaaaatcccaaaagtttgtctttcccaattaccattgatttcccctgttcccaaataatgagggtgaaggtatcatgtttagccttctccatatgcataaggcacttaacagcttactctaatgtcttctgtcatgttgctctttttcatcaggaccaaaagaattttgatccagttcaaattgagcaggagatgcagtccaagttgccactgtgggaatttcttcaattccctctacccccaccatggaacaacactaaacgtctagctacaattcatgagcttatgcacttttgtacgagtggtgagtccattgctttgtcttagcttaaactcaatttaattaatggtcatatatgcctcttaaaattacacccttatttacaaaaagtattttcattattgaaagacctttcagaggctaaggtgggtattttgattgactacaactttcttgtttgaataatgtcattagcaatgttatcatagctataatgcataacactcttcaatttgatacactggggtttttttcccgttgtgttttcttaaccacaataattcccttttttcctcgttttcccccatctctgtcccaaatactcccattgacgtcattggagatgatgtggtaatcccatcctacttacagagaagtaaagggctgtgtgtgtgtgtgtgtgtgtgcgcgcgcgcacgcgtatgcacgcacgcatgcacgcatataatttccaggacaatgctgtccttctgtcttctgcctgaccactgcactcttttatcatcattgcaaatcatgtaaaaattacagtaacattgcagagacattatctggaaagagggaagagcaacctggaccatgcaactttgctccaattcagcgatacctgtctttgaattttcatcttatatcctcttgttgcagccacccacaatcaataaaacacaggttccagaagaatttttcttctgtctctttccattctgtcctttcacagttctttctttttttaattagagaagaaaaaaaaagaagaggatcgagataatctgaatttggcaggaatgttcaccagggtaaaactaatgtgagcactaccgtggaccatctctgcacatgaggacaggaaggaactaagaaagagtgtgacttgggaggcagatgtagatatcttgtaaccagtgctactggaagctcatatttaatcctatcttgagagaaaattctgagcacactatttataaccagaaattaaatttgtatctagaaagatgaatcatagaaccataaaatttcctaactgaaagaaaccttggaattaatctaatcgaaatctattttcagataagaaagctgagatcctagcagggttaaattatttgttttaggattataacagtggtggaaaaaaaaagaaaacattctggtctctggatacccagtagaacacaatttccttacattactgagcaggagtcaggaagaaagccacctcagaagtctgatggtacaatctgcaattttaagcacccgctctgcacctagagatacacagatgaatagagagcccactgtcagcatgttgctgagcaggagttgactcaagctaacagcttctcacagcaggaagagccattttatgctctttgaagacagtgggaagaggggtcattaagatacaatatctagaatcacgtctcatctgagttcactgggattttgtgatataggcagtcatttcccaaagcaaattctcattcccacttaagggaatatgtagatactacctataagaaaggacattaacttccacagacatctttacttgacaaggaagcatttgacctagaaaagaaaagagcatgtgcatattcttccttaccatttcctttgtaagcctaaccgaactaaaaaatatttttatcttgatttctttttccacttttaagtaggcttagtaatagaaaaagccaggaacttctgagtcctaccattgactcctggacatgcagggtatagcctcgagggcctggtatgtcatttctgttgtgcacataactacccccttcctgagtagggggtgaacttctgtcctttttctgtgtcctgccaccctccacttctccttctggcttaagatgtgactccattctcccttcagctcagctctctacgcagcacagcatttttgttcctgctgccaccattgaaacctcacacatatgctgcttacatgccccatcctggacccttggtgctcctcccctcttcctcttttcccttttgccacatcatgcttaacaagtccaaaaccaagctcttgattcctcatccctaaatttgtcccttcaccatctcccttatttcaatgaatgacaactactttctatcgaaaaccttggagtcatccctgctgtctctgtttttgtttttgtttttttgagacagagtctcactctgtcgccaggctggagtgcagtggtgtgatctcagctcaatataacctccacctcctgggttcaagcgattctcccacctcagcttcctaagtagctgggattacaggcgcacgccatcatgcgcagctaatttttgtatttttagtagagatgggctttcaccatgttggtcaggctggtctcgaactcctgacctcgtgatatacccacctcggtttcccaaagtgctgggattacaggagcgagccaccgcgccccaccgctgtctctgttttctcacacactgcaatcaatcccaccatactcctcactaccatcccagcccagtcccccaccacccctcaagtggactattccaatagctttccagctggtctacaggctttcaattttttaccaacagtcttttttccacacaaccacctgaatggcccttctaaaatgttggttggatcatgtgcctttgtaactgaaaactctgcagcagtcacccagaataaatcctaaactgggccaggtgcttggctcatgactataattccagcactctgggaggccgagacgggtggatcacttgagctcaggagtttgagaccagcctggccgacatggcaaaacccatctctacaaaaaatacaaaattagccgggtgtggtggcacgtgcctgcagacccagctacttgggaagctgaggtgggagaatcacctgcactccagcctgggtgaacctgtctcaaaaaacaaaacaaaacaaaaagcaacaataagaacctaaactgtctgccacctactttttgagccatcacctatcaagctgtcatgttccattctccctcatctacactggcctcactgtgattccttgaacatgtaagtcacacccctgcctcaggatcgttgcatttgctgttttcccttcctcagtcactttcccccagatatccatacagcttgctcccctacttccttcacatttttgcttaattgttcagaggacttttccatgactgctttatataaactagaagcccctccctgactattatcactttttgtcccctcagctggctttattctttttgtcatctcttttatctcttacatttatctgtttccaacgactagaatggatattccatgagagcagggagctcactattttgttcaccattgtgttcccagctttcattatagttaatgatgcctaataggggctcaaaaaatatttgagaaatgaacaaatgagcaatctctccttccttctgtaactcttttacctcttccttgtctctcttctgaatctccctgttttttcccaaaggacctgctgcttttctcatctttgctggagagaaaatggaggttacttctgaattattgatctgcatcattttatttttttctgattgaattccatgtttatttgttaattctacttctccttcctctaccttggaacttctaaagtgtaagagccaaatcttgattctttcaaatcccaggcacctgtgacaaagcctaatacgtagaaaataataaccaatgaaagagtgagcaagtgaataaatgctgtaaaaaggtaaatacacaattataaagcctgctgaaagctgataaactttgaagtgcaattatggaaaatactgcagcagtttatgtgcacaggaggaagcctttcctgagcccaaatcaatagaaaaactcagtcaatataatagcctatattaggcataagtaaataatttctctgttttaaattacaacaggagaaaagggtgctttcactcaaaaataataagttgtgtaagcatattcaaccaatatggtaccctggaaagtccatgcaaatgaatctggacacctaatattgattgagctatgaagcagtttgggagcattataatttgctaaattttatctttactgtgttgtttgcttatcctcaggtacctttgatatttgcggcagactggggagccaatgtttaaaatcagctcaacagccattgtggcgtgactctcttgtctttctggtagacagactccctggttatccctctgtcaaccctgtaccatgtgctaataagaacatttccagcagcactggttctgctttcttacagatgtcttgagctggaatgaagtagaacgagccttcaaggtgtttacttttgagagcctgaagctctctgaggttgatgaaaaagggaaactgaaaccttctgggatgatgtgtgggtcagattctgaaatgttcaacataccgtgggacaaccctgccagatttgctaaacagataaggcagcaatatgtcatgaaaatgaatactcaagaggccaagcagaaagcaggtacactgcatggagggaatggaaagcattcttgtattttatgatcgtcaatttttctcatattgtatctcatggatgttccttacactgaatagatattaaaatcaaagacagaacactatttgtggatcagaatttgtcaatgtctgtgcaagataatgaaagcaaccgagaaccttcagatcctagtcagtgtgatgctaacaatatgaagcattctgacttgaataatctcaaactctcagtccctgataatagacagctgttagagcaggagagcatcatgaaggctcagccccaacatgagtctctgggtaagttaaagtgtgtgtgtgtgtgtgtgtgtgtgtgtgtgtgtaagacactattatagtacacataaatcaaaaaatgtttaagatgcattatttgaatttaagttatttggttaattaaactttcttactgagtattgttgttccataagttctctttatttcaacccttgtttttaaaaatatcttaattcctcttagtccacacttaaccttagtaaatttagcacagcaaacatcattaaaactttcatcattagtgttacacagttattgtgattgtgtgctaaaaattataaacattcatctgcaaaacagaatgaaatgtccagtacagagcttggttcaaaatcaatgctcagtgaacatcatttcccctcctctcccacttatggctcaggctattactgtcattgtagactagcattaaaaacagtgctatattagtgctatatgaggaggtgcaaaagaaggatattggtctaaatttatactgagctaccttacacatcactgtcagattaatctgtgtaaaatatagctattttgtttctctacttacagctttcaaaggcttcctactatctgcaaaatagaacacaattccttggcctacttctccagtagtatcaaattacttttcccaaaacctttttccatctttttgctgttgctcacacactctgtgttctagcccaacagaattaggcctatttactctgcacagcctgctcttttcaatctctgtggtacctttccctcacaatatatcctccaccctgagttctctttttgactatgactaggattcagtggcacctccatgaagtcttattggatgtgtccatatggaaatgcctctcttagcattccagggtcataattaagctacacttctggtgaagtgctgtggctcactcctataaacccagcactttgggaggccaaggcaggaggattgcttgaggccaggagttcaagaccagcctgggcaaaatagcaagacctcacctctataaagaaaaataaaaaaattaatctacactctcgttatggcattagttattttctttcaattttataattatgtatatgcctatattaaggcctccattataccatagcgtcttagtgattataggtttattttaacatattaaacaacacctaaatttaacacctaggtcaaacattaaacaacaccaaatttaacatattaaacaacaccaaatttaacacctaggtcaaggaaaaattacaatagaaattgggaaatatttcaaaccaaatgataatgaaaaactgagtatcaaaactatagaatgcagctaatgcaagaggtactccaaaagaagtttatagctttaaataaatatttttctaaaagaagctaaagattaattaactaaacatcaaccttaagttagataaagacaaacaaaataaatcaaaataaagtggaagaaggaaaacaacaaaaaatattaaatcaaggaaatagaaaacatagatgaaaattacgtcaatgaaatagaaaacatagaaacataggaagaacaaaaatgcaaaaacttggttctttgaatagactaacaatattgataaatcttttatataaggttaatcataaaaacccatgaataactctatcgagaataaaactatatcaggaataaaaatcatataaggaataaagaaacagagacttccctcagattctacagaaatttaaaagattgcaagataatataaacaactttgactaaatgtgaaagtaaaatgggctgttactggaaaagaataacttaccaataatgacccaagaagaaatagaaaacctgagtagtcttatatccaattaattatatcagtaatcaaaaatcttcccaaatagggcacacttagcctgaatgatctcattggtaactgataccaaacactaagaaagaaataattctaatcttaacaaaaattattccagaaaatagaaaagtagcatatcctcctctattcattttatgaagctagcataaactttataagaatactgacaaggatagtggtacaactgaaagttaaagtaattcattaaattaaactcattcacgaacatagatgcaaaaattctaaataaaacataggaaaactgatctaacatatactaaatgataatcatatatcacaaacaggttgcatttataacagggatagaaggaaaatatatacattgtaaaatcaatataacatcaattaacacattagtgagaaaagtcatataatctcaatagagcagaaatagcatgtataactctgtagcaatttatgaaacaaatcttattaaactagcaagagaagaaacactactcaatcatataaatgttatttttcatattactacaacaaaccttatatatcaaggtgaaaagttgaaataattccctttgagatcaggagaatatccactataaacacttgtattcaatattgcatcagaggtgtatgccaacaagcaagactttttctcttttagataaaagcataaggtttgaaaaggaagaaataaaaccatcattatttgtaaatactgtgtatgtagaaaactcagaacaatacacaaaaaaattagaattaatatgaaagtttaataaggaggctgtgcttgttaaatgatacacataagatgtctggagtgctgagactttactgttataattattcattgtattaaacatttgtgtttcatgcacttttctttgtgtgttatatttcataattttaaaaacatttaaaaaataagtggttatgggccaaaattggataaaaaaagaaaaaataaattttaagaaagtgataacatgagagaataagtgttaagttagtattgactaatggtcatcttacccttttcattaatctagaggtgggtcgaaaaggaagtaatcaatggaataggattggtagaggaggcaattggagtgaatggaagagggaagaaaataacatttatttaatattgctctgctatatctcaagtacattaactaatacttacataaacatcagcctatgacaaagatactattatcccaatatcccaattctacagatgaggaaaccaagacttagaaagtttaaataatttgttcaactacatacaagtaggaagtcaggatttgaacagagggctaacttcaaaccagtgcttcctccactgtgtcttgcagcttcctgagttccagaaattcctggtgatgcagctaatgatttagccatgctcctagtctcattcatggtgatttttatgctgattttgttgcctttgggatttccttccttctaactagggtagattccctatttctttgtcctaagtacccttacctattagcctacctctcaaaaaatttaagccaataaattaacctgagttcttatggcgatagtgtatcctatgggactacaaatgaatgacagggaagtcactctgggttaatatagagtcagaataagccaggagaggtgtaaggcccaaggtgttttctttgttttgtttcatttttttttctttaaagcagctggatagttttccttaggcaacttttgccacctggtggtcaaactacataaattggtgtgctggattctggaataaagtagattattatatgaatagtaacttcctaaattctcagggttgaaaatgctatagtggacagtgtatcctagaggccacgcaatctggagggtggatctcagggccataagtgtttctccgtggtgcattttgacctacttccaggagccattccatttgaaagggggagggcatctgggcttggtgtcacattgtagctgttgtgagtatgggactttgttgttgttgatgttgttgattttacatttctttccctaactctgaatcatacttacttcaaagccgccaactttaattctctttaaacaaggcaaaaatcattcatgtatttcctgcacaaccattttagcatcaaatacatataaaagccttttcctggacataaagggctgaatatttgtgcttttcttaaccaaatactggatttccatctgagactatttttgaacttgacagggcctagtggatatttatgaaaaacctgagagttgataaccgcgaggtttagatgtgccctttatgcttgttgggtgtttttttaataaagtaactgctttgcagagggatcttgttatctctaaagtaaaacagattaggaaagctgtttttcaaagggatgagaaagcatccatttccagatgtgtcaaaaactactgaatcacactgtcaaaggattatgtggttgaaagcaaaaatcagaaaaagaaaaaaaaatgatttttactctactattaaataaataattcagattacttttagaatgttctttcctttgacaaaataactgatgcataatttttagaacatattttctaaactggagactttttctgctggatccttaaacataggagggaatatcaaatctcccggaaatctggcagaccacagaatagaataatttttatccacagatttcatatcaattgcttcaaggacacatgagacatcatggtctatttagagttatagttggcctgagttttctcttcagtggatgtatttatataaatgctgaactgaattggctgtatggttttcccctaaatcaaaatggaacgttcatgctgtcaccttcaccagcccaaggcaagatggaactagtagcaaaaatgtaagtagctgtgctcctgaaagaaagaaaaacactggcctgtccttcataggcacaatcagcttctccctctagaagcccaaatatggtactctttgccacagaataaaaagttgtcttatgcttgccacagaataaggctttgttgtaggttttttcccacatttctaatttctctatatggctctaggttaatttccacgtttaatatatgatgtagattcttctcattcaatcaaaaggaaatatttactgagttcctgccagatgctgggtgctcagagtacagttaaaaataataataataataagatgaagtttctattctccaggaatttacatatgaggtggagagacagaccataaacaagtaagtagcattaggcatagatacatgctatgataaaaaaaacaaacaaagcagaggatgaggcagaagactcttgagaaggtgatactcgaccaatatgaatgaagtcagggtctgaaaaaggtgaacagctaagggcaaagcataccagagagaaagaaagtgcaagaccctcaagacacagcaagcaggccagtgtatctggagtagaatgagcaagggagagtcaaagagttgtgcttaaagagttaggccagagccatttcctgtacaactttgtcagacataatcttcatttattctaagagtgataagaagtcagggctgttcagttgttcagcagcatcaaagtatattcccacaaaatccacctcccacacacacatactctatttctgtgatcaaatttgcaaaatgctatatacattatccatttctcaattagagattcacaataacaagagcaaattacaaattctaagacattcatagtgagatgttcgttgatctatgttaaacttatttatcatggaactctttcttctggtgatgcagaaatcaacaatatgaatgtgttccttccctgttcattcacatggctgtttgcttcatagccaaggatgatatcaccatcccaatcatcatataagtatactctgtcattactaggaaagctagtgtgcatgactcatattggtccatagtgtgcatgactcgtattggtccatggagtccaggtaccgcttcatttatttatttaacttttgttaagcttcatttgtaaattagcagatgctcattaaataatttttaagttaataaatgattaatgaatggaagggaagctctgcagaatggtgaaagcgtatcattttccaataggaagtgcacttatctgccagtgcctctttgcacgcatggcctgcccccaccctagtctgtcatccacaagataagatccacagaaatttaaaaaggctttgtgatagtcaccagcacaagaagacaaatcatgtgtactaagaagttgatttaatcagtaaataattacaacttttaaagataaaggtatattgttagaagtgaatgatacagtctgaaagcagaatatctggtatgatttaagatatatcacacaagaagctaggttcttttcaaagagcttagtataatttttctaggtaggcacagatttagaattatggacacaaacacctttctggaggcacaaaacatgcctttcaggcattgccttttcagcacagaaacatagatcatatgggcaacaaaaaagcacagcattaaccagcagggcaagaacaaagccagaacacaactggatgttggtgtctttgatttgcagagcagaccacaaacaatgagatcaaagatgatgcagtcacaaaggctgattctcatgaaaaggtaaggaattatttttctgaaaatgtagatgacaagatgatctgagaaaaaccatgacttggagtaagaaacactgaaaaagaaaaaagaagatacttagaaggagaatactgaggctagaaaagaggaactattcggacatccccagagcagctccaactggacagaaaggagttaatattgctaggcggcttgcgcataacttcccagctccttgctcctctctagacagtgtggcttggcaacctcacaaacacctgctcaccatacagccctgtagagctaacgttgtcttgaagagagttcagaaaacctgcctgtaattgctaacaggactcagaagagtataacctaacaataaaaatatttagattatgttgcccataaaaaaaaaagtcaaaggcatactctttttggcagcagctctcctaaaatgttgccatatggatttatacatatgcagatttccccaattagatggagtacatactggttagttgacggagcccaagagggctccatttggacttaaacaaattaaagctgaaattgtgttcctatgatattttagaaacccaagaagatgatggtggaagcagatttagaggacataaagaaaacacagcagcgcagtctaatggactggagttttactgaacattttaaaccgaaagtactgcttcaggtatttatggactgtgattctctaggagacggtcagataggtctggagagtctgctgtgatttagaacagttcacctccaggtcattctctcagatctagttcagatcaatagtctcctttacttcagctataaaataaatttactcccagcttgagctatgcattcccagcgactctctaaaatagtttaaaatatactttatgaaagaatgcttttataaaatattttaagaaaaaaagaaatatacaagactgctgcatatatatatttttttgctgctgcatgtattttctaaaaacaaagtaaggttttattgggaaaaaccttatttttttccatattgtttatccattctactcaatttcaccacatttcacagtattttctgttttgattaacagttcaatggaatctgtggtagccaacattcattgagcacttaccatgtgccaggcactgattaatatgtattattagctcatttaatcctcacaataaccctgtgaagtagaaactatgtaagcagtaagaaactgaggcaccttgaccagtagtgacttttgtccaaggtaacatggcagctaagtgagaagctagatataaacccaggaaatctggccctggaacttgtactcttaaccactcagcaaaataacaagtaatcccaaacctaaatccttttgttgtgtttagcttttacacaaaaacttgtcctcttttggttttgtctttttaatttgatttttatttttatcaaagttttacaacgttttttaagccagaaagttctacaaagtcttactatgaaaaatagcagcctccttcccccatccccaccccactccaccaagccgcagttctcagaggcaaaaatcttcagtgcatttacccctttcttttgttactttactcggtgatctctaaatagcaagtatattttgtttagttttagttttgtgacatcattaccaattgattcgctcttgagaacacagctttgcccacccccatccaacacacatgtgcatgtacaggtacaggctcacccacccccacattcacattagcacttctccattctctgatactgttaacaatatcgtaatttttggttagataagtattcagaactcactttatttcagttatgtaagtgctattcacagctgaactgtgtggtattctataattacatttcctgtatgggtaccatttttattttctctgcagttaataattgcctctttttctatttgtttagtttactatgtatttattattaacttatccccaaattctctactactgagtaagtcactcaatacattcaaacataacagatattctattagttttattgtattagtgatatctctcccatattccctaagcttgctgcacagctgtggtcctgggcctccctttaccgtcatccgggccacacccattcccttcctttccagttagatacctgttgccttcatcccatgtgttccctctccggttactctcttttttgtagagaatcatctcttccagtagcttccttaattaagatagacgggaagtaaatttttgaggcattcaatatttgaaaacagcttaattctatctttatattgactgacagttgggctttatagtaaatgctaaattaaaaagcattttttctcaatactttaaagacagtttttgacagtgttctgacttcccagattgtccttagaaaaataaataaatacaattctgattcctaatcagttgtttgagtatgttgtgatcctctccctggaagattttaagatcttctctttgttccaatgctcttgatttcctgttgatatgcctttgtgtggttctgtttctatgtattgttctggcaagccggtgcaatccagaaattcctgtatttatattttgggaaattttctataatcatttctttgataatctctcctctccattttctctgtccttttttttctggaaatcttattactctggtgttggacctgctagactgaacctgcaatttccctttcttttttcttttagtttccatcaatttatcttttggctttgctcaatttccattcatttcttatattgagccctttattcctgttattatcattctgatttcctaaagttatatttataatttcaaattacctttttaaagaatcatttcactttttcttttttttgagatgatgtctcgctgtgtcgcccagcctggagtggcatgatcttggctcactgcaacctctgccttccaggttcaagtgattctcctgcctcaacctcccaagtagctgggattacaggcacttgccaccacacctggctgatgtttgtatttatagtagagatggggtttcaccatgttggccaggctggtcttgacctcctgacctcaggtgatccacccgccttggcctcccaaagtgccggcattacaggtgtgagccactgcatttctgatataataccttctcttatctctatgaggatattaaagtcctctgaagttgtcttctccatgaattatctctttttcctccaagtttcttttctcattttttgtcttttttgtttcgtcttcatttttcacattggagggtaatatataatattgtcctctttgctcatattaataatgaaacaataaaaatatgataggaagtgctatatgaggtggggtggggggttgtcaataactgagttcattgttgggtgatttgactgggagatttccataggagactcaccattgttggtatgtcagttctgttttcttgggccatttaaattctccatgaaaaaaaaaaagtctaattttctgtctgaaagacataagccttcctgtcagtgttttgagagctaggtaatgagggaagggtattaagcttctgacatttattatctagatctgcattatccagtgtggtagccactagtcacatgtaacttctgaatacttgaaatgaatctagaccaaattgagatgtgcaataactgtgctatacactatataagtgctattacacactcaatttccaagactttaaaaaggtggcattgattacttttacattgtttatatgttgaaatgataagaatttttatctatcaggttaaatataatatatcattaacatttattttacttgtttctttttactttttaaaatgtggctactataaaatttagaattgcacatgtggctcacatttgtggctcactttatatttctattgagcagtgctgatttaggcttttacacaattccctttttttctagaatgtacttctctgtcagtgtgcgttgggtccactgttcttagaacccattcatctaccatctgtagttaccctcttcccctctgctagagtgggagataggcaatagcccagttgctcagaattttaatggaatccaggggcctaactgcttcttaaaaagattttaaactaatcttcctattttcagtgccactttcaccccacttgcagaggtgactagtatttccatatcctgagactttctatatttctgcacacaaatggggttgcctgtggtctctcctaaaattaatcttaggacttggctttctgtattctgctaagtcatttagcatttatccttctgctttccagcttctaaaattccggtgcctttatctcctctccttcaacaagttgaagttggctttcaattttatgatattaaaaaaacaaacaaaatgttactgttcttttaatgaggcgttagagagtgcaaatgttcaatcttttctctgtaactgaaagtttacttcagactttatactatttcagtttttctcagtccttactgctccatgaagctgcacttttcaaggtaatcaataatctttgtcttgccaaatctaatggacacttatctttcttcatcttccctgacattttaacagcattgcagagcttatcccttcccccatgaaacactctgcactcttggtttcctcagtgttgtatttggaattttgttgacttttcctcctttacccagcatctaatatggaagtgcctcaaggctctggagcctccaggaagccctagagcatcttcttgcctctgtaaacacccttctttgatgatctcatctgttatatactatctaatgctgatgcccatatcttttaaattatctctctctagagattcacattattataccttactcaaaattctacctgaatttctgatcaaatttagtatccatctcaaatttagtatcctatatgacactcatatttttcccacctaagcatttcttcccttgtccatctcagaaaaggtcaccatcattcaagtgctcaagcaaaaagccagaatcatcctttgttccaacctctcctttatccctgatacctaatccatcatcagtgtttaaggggtatacctccaaatatatcttcaagctcttctgcaccacagctaccaccacttttttttttttttgagacggagtctcactctgtcgcttaggctggagtgcagtggcatgctctcggctcactgcaacctccgcctcctgggttgaagcaattatcctgcctcagcctcctgagtagctgggactataggcacgtgccaccatatctggctgattttttgtatttttagtagagacagggtttcaccatgttggtgaggatggtctcaatctcctgacctcatgatccacccaccttggactctcaaagtgctgggattacaggcgtgagccaccacacccggcctacttttatatgactaccaccctctaattccaccacaatatcctcctgattacctgcttccactcttgccctgctctaatccattctctatatatcagatattccattaatttcatcttttcggacacacctccttcaactccaaaataatctataaagccacaggtctgtagtcccaactattcaggaggctgagagaggaggatagcttgaggctaagctttaggggccagcctgggcaacatagcaaggtcccgtctctaattaacaacaacaaaaaaatctttatcatattttagaggaaaatcttatctattttgtttatttttgttttcctagtacctgcacagtgcctgccacacaataggtactcatttttaatgaaaaacttaactaaataactaacgtaaccaataatattaatacagaataaaagacaagcaccaattagtaaaaaaggggaaaataagatatgaaaactttacatattgattgagagcagctatagttctgtgaaacttagtgctgtatttttagcacccccaaagcaatatgaaaacccaaagatttcaaagctcttattatctaaaagaaaggatatatattcatcataaacgcaatggttttctgggtttatagtgtgagcagaatttgcttttcaaaaaaacatcagtaagtactagatgataccctacataacaatattttaaaatgcaaagatattcaccacatgtatgtttcttatgttggctctgaggaaacagatgtaaaagtgccactccataaagacactcattcaggggactaaattggggaagcaaatgtattgttttgattatgctaccaatgtagaattgaaagcaaaattaaagcagcccttttctaacattattatgttatatatatatatattatatatatatcactccatgccttcagatatgcaaacaatagaaaaccaaaagctgcctcagcaaattgatattgaaaacaaaaacgaaagcccacagctgtctaatttatttttcctattgacaatttccttattgttgattggcaaaggaaacaggataagcagctgcccactgtgtctctctactggtagctaccaccgcagtgcatgctgaggatggtatgttttagaaagggccagagttggaaggcaggtagaaacggtatgtgtcagaaagaccactcacttcacttcatctaacacagcatggtatagtggagagaatgcaaaatggtaaaatttagagttggaaaacagggatgagccctggcaccataacacacagtgttcttggacaagtcccttactctctcagcctcaatttatgctgaaaaaatgagaattctaatattttgatatgggaaaaataatcatacctactgatttagtccgcttgggctgccatgccaaaatgccatgcctgagtagcgtaaacaacagaaattttctcacagttctggaagctgcaagtctgatgtctgggtgctggcatggttgagttttgttgaggactcccttcctggcttgtgcctttgcgttgtgtcctcacatggcagagagagtaagagggagtggggatggagaagggaaagagggagggagagcaggttatctgctgcctcttcttataacggcactaatcttatcttgacggccctagtctcatgaccccatcaaacctaattactttcccaaagccccatctccaaataccatcacactagcagttaaggcttcaacatataaatagggatggtgaacacaatttaattcatagcatctatttatgtggagttttaaatgatgataaaattagatggtctatatcaaggcatggaaaatgctagataaatgactgctgtgcttaattattacctaccaaccttaatgaagaacacttgtagcaagcgccgctctgcctgatgcctagtatttgtttttctaaagtgttgctgaaatgcttcccaagctagctaccatttatgctctcaccttctagcagctaggaaagaaacctctgggaatttcaacttgactaacaatgtagaggtgaatgtaggaaaaaaagggagtagagaaatgccctagtaggagacccttctcttggggaaaataaaaaagattctacaatgcaattattttgattttcaggtccttcaagaagcccataagcaatataggtgtgttgattcttactaccacacccaagacaactctttacttttagtctttcacaatccaatgaatagacaacgtttgcattgtgaatattggaacattgctctccactccaatgttggattcaggtaacaaatttggaaagtttagttaattagttagttgggtttagttagcttgccagttacttagttacttaggtgttagttccttaccctaagctagggggttcagctcaatgaaaacatttgtgtagtactatagattcaattcagctcactaaattgaatgtcagcatgtgctgggcactgtatgggcattggagctataccactaaagaaaacaggtgtcattcttgccctcgtggaatctagtgaggatgttgttaaattacatttgattcatttagattccagtaaaactgtctccaaaagatttcaagtaggaactataaaacatgacattctgcatgttgggtttttttaactctattttatctggggaacattcaaaaataggtcagctgagtaatataccaacagagcagtcaggtttccagcaaactgagagcctaggggttagtgattttttctttccagctccttagttattccctttttctcttagaactttgttctctcttctcattaagtatgatgatatttcactgttatttcaatactggttaatgtattttcagtattatttgtatagcattttttttagttttaaagaatacagaaagatttacagaatggacttacataataattggggggaatatactgtatgtgggcacacacacattttaaagtcataaaatgactttaaaatgaaggaatttggtagatatactaatataacaccttgaccagttaagctgtgtttgtctttgttttgtttttcgttaacaataattacgcattttatccctttgccttatgtcttggctaggatctccaatttaattttgaggagaaatccttgtcttattccagattttaaaggcaatgtttcgaatattcaacaattaaatttttttttttgctctaggatttatgtaaatattccttattaagttaaaaaaactatttctagtttgctatgagttctcaatggtcattaagtcatatcaattaaatgatttttctggatcaatttaggtgtttatatttttttctttaatctatgaaagtgctaatttcattaacagatattctagtgttgaaccaaacttgcgttcctgtagtaagccagatttgtccattatgttatcttctttataattgccacatttgctttgctaatgtattgtttagaatagttacatgtgtattcatgggcaagattcagctataatttttccttgctttaaatattcctatttggttttagtattgagattatgttaacctcataaattaactggagaatgttctccctttttatttttattttttcattttctgaaatagtttgtggaaaattaaggtatatgttcctttggcatttggtagagcttgcagataaaaacatacggcccagggaagatgtttgattactgacacgacttctatcatggttattagactcttcatgttttctacttaattttaattaggtttataatttatatttttccagatatttgaccattacacctgttttcaaaagtattgacataaagttcattaaaatattcttttaccttttaaacctgtgttacgtgtgtctatattctttttcgttcttaacatttttaatctgtgatttctctatatttttctggatcaaacttgccaaaggtttgccagtcttactaatatttttaagaaatctgttcttgctttctaactctttctccttttatctcatttaattttgccagcatcttgtttatttctcctctttaatttccttggattattctgatgttctttaacttcttaaattaaaatcctatcttgtgattttgagttgttttttgttagtttttgttggctttttccttattagcatttaaggccaaatccctccctaaataccgccttagcaacacctcaaagtatctgactgatagtatttttattatctttctttttttattttattttattttatttttaattttattattattatactttaagttttagggtacatgggcacaatgtgcaggtttgttacatatgtatacatgtgccatgttggtgtgctgcacccattaactcgtcatttagcattaggtatatctcctaatgctatccctcccccctccccccaccccacaacaggccccaaagtgtgatgttccccttcctgtgtccatgtgttctcattgttcaattccgacctatgagtgagaacatgcggtgtttggttctttgtccttgtgatagtttgctgagaatgatggtttccagtttcatccatgtccctacaaaggacatgaactcttcattttttatggctgcatagtattccatggtgtatatgtgccacattttcttaatccagtctatcgttgttggacatttgggttggttccaagtctttgctattgtgaatagtgccgcaataaacatacgtgtgcatgtgtctttatggcagcatgatttataatcctttgtgtatatactcaataatgggatggctgggtcaaatggtatttctagttctagatccctgaggaatcgccacactgacttccacaatggttgaactagtttacagttccagcaacagtgtaaaagtgttcctatttctccacatcctctccagcacctgttgtttcctgactttttaatgatggccattctaactggtgtgagatggtatctcattgtggttttgatttgcatttctctgatgaccagtgatgatgagtattttttcatgtgttttttggctgcataaatgtcttcttttgagaagtgtctgttcatatccttcgcccactttttgatggggttgtttgtttttttcttgtaaattcgttttaattcattgtagattctggatattagccctttgtcagatgagtagattgcaaaaattttctcccattttgtaggttgcc

SEQ ID NO: 812 - DNA, 2217 bp, Homo sapiens
attaatgaaataaatacacttgttggatctgcttcatctaaaaaggcaaaaaaacctgtaggtggtaatgctcctttatattatgaggtgttaacggcagcaaaagcaattatggatagtggagagaaattaaccttaccactgatagggaaactcttgaaatttcaacttctccagattaaatttaaggaccaacagcgacgggaaaatgaaaagaaggtaatagaagacaaacctaagttagaaaaggataaagggaaagcaaaatctcccaaggagaaaaaggctccaagtgccaagcctgccaaaggaaagggaaaggatcagcctgaggcaaatgcaccagtgaaaaagaccacccagttaaagcggagaggagaagacgaccacaccaatcgttacattgacgatgagccagatgatggtgcccaacattacattatagttgtgggctttaacaatcctcagctattagcaattatggctgagcttggcattcctataaccagcgtgattaaaatatcttcagagaattatgaacctctgcagacacacctggcagcagttaaccagcagcaggaagttcttcttcagtcagaagatctagaagcagaaaaattgaagaaagaaaatgccataaaagagcttaaaactttctggaagtacttggaaccagtcctgaataatgagaaacctgaaacaaatctctttgatgttgctcgacttgagtacatggtcaaagcagctgattttccttctgactggtcagatggtgagatgatgctgaaattgggcactgatatttttgaaaatattgcctgcttgatgtatgacatcctggattggaaaaggcagcaccagcactatttggaaagcatgcagcttattaatgttccacaagtggttaatgagaaacctgtattagaagccatgccaacttcagaggctccacaacctgctgtaccagctcctggaaagaagaaagcacagtatgaagaaccgcaagctccaccaccagtgacttcagtcatcacaactgaagtagacatgagatattacaattatttgctgaatccaattcgagaggaattcatttctgtgcccctgatactgcattgtatgctggaacaggttgttgcaactgaagaagatctcgtcccacccagtctgcgggagccatcccccagagcagacgggctagaccacagaatcgcagctcacattgtgtcccttctgccctcactctgtctctcagagagggagaaaaagaatcttcatgacatatttttatctgaagaagaaaatgaaagcaaagcagtgcccaaaggccccctcctactgaactatcatgatgcacacgcccacaagaagtacgcactacaggaccaaaagaattttgatccagttcaaattgagcaggagatgcagtccaagttgccactgtgggaatttcttcaattccctctacccccaccatggaacaacactaaacgtctagctacaattcatgagcttatgcacttttgtacgagtgatgtcttgagctggaatgaagtagaacgagccttcaaggtgtttacttttgagagcctgaagctctctgaggttgatgaaaaagggaaactgaaaccttctgggatgatgtgtgggtcagattctgaaatgttcaacataccgtgggacaaccctgccagatttgctaaacagataaggcagcaatatgtcatgaaaatgaatactcaagaggccaagcagaaagcagatattaaaatcaaagacagaacactatttgtggatcagaatttgtcaatgtctgtgcaagataatgaaagcaaccgagaaccttcagatcctagtcagtgtgatgctaacaatatgaagcattctgacttgaataatctcaaactctcagtccctgataatagacagctgttagagcaggagagcatcatgaaggctcagccccaacatgagtctctggagcagaccacaaacaatgagatcaaagatgatgcagtcacaaaggctgattctcatgaaaagaaacccaagaagatgatggtggaagcagatttagaggacataaagaaaacacagcagcgcagtctaatggactggagttttactgaacattttaaaccgaaagtactgcttcaggtatttatggactgtgattctctaggagacggtcagataggtctggagagtctgctgtga

SEQ ID NO: 813 - protein, 736 aa, Homo sapiens
INEINTLVGSASSKKAKKPVGGNAPLYYEVLTAAKAIMDSGEKLTLPLIGKLLKFQLLQIKFKDQQRRENEKKVIEDKPKLEKDKGKAKSPKEKKAPSAKPAKGKGKDQPEANAPVKKTTQLKRRGEDDHTNRYIDDEPDDGAQHYIIVVGFNNPQLLAIMAELGIPITSVIKISSENYEPLQTHLAAVNQQQEVLLQSEDLEAEKLKKENAIKELKTFWKYLEPVLNNEKPETNLFDVARLEYMVKAADFPSDWSDGEMMLKLGTDIFENIACLMYDILDWKRQHQHYLESMQLINVPQVVNEKPVLEAMPTSEAPQPAVPAPGKKKAQYEEPQAPPPVTSVITTEVDMRYYNYLLNPIREEFISVPLILHCMLEQVVATEEDLVPPSLREPSPRADGLDHRIAAHIVSLLPSLCLSEKKNLHDIFLSEEENESKAVPKGPLLLNYHDAHAHKKYALQDQKNFDPVQIEQEMQSKLPLWEFLQFPLPPPWNNTKRLATIHELMHFCTSDVLSWNEVERAFKVFTFESLKLSEVDEKGKLKPSGMMCGSDSEMFNIPWDNPARFAKQIRQQYVMKMNTQEAKQKADIKIKDRTLFVDQNLSMSVQDNESNREPSDPSQCDANNMKHSDLNNLKLSVPDNRQLLEQESIMKAQPQHESLEQTTNNEIKDDAVTKADSHEKKPKKMMVEADLEDIKKTQQRSLMDWSFTEHFKPKVLLQVFMDCDSLGDGQIGLESLL

SEQ ID NO: 814 - DNA, 73148 bp, Mus musculus
  misc_feature (1)...(73148): n = A,T,C or G
tgtatgaattttcccccactatattctttgaagggtatatgtgtttttcttttaacatcaagtatataatcctctgcaggtcatgaataaatgtctgggtctttaatattagttttgaaattatgtaaaaatatcctgtctctcagtaaaaaaagaaatctggatcactgtagaccagaaaatattccagaatagacaacagttttagcattttccctactttctggcttgtgctatgggctaactttttgacttttgaatctttccttcattttcttgccaaagaaaagatgtgtgtacaggtttacctcataatttgggagatgtgtaagaacagtacttctgacatgaaactctctggactgtgtctgacaaaatattctgattatattttacaaactttttttttgttatcttaacaagcaggtaagatcagcattatcattataacctgttcccctgttaaagaccagaaatggcggcataaaaaggtggagtaatatgcccaaggctggggtcaatacacggtgggtgtttgaatatgagaacagcagcgtcggtatatgtatgcagcatgccaatcggtcatgtccatttctgctctgtacccagctctcttccagtttgcttaaaatcagagtaaggaatctgggagtcctaggttaggcctacagtcccagaggcaagagaattgggaatttgaatccagcctgggctactcattatgtaacctgagcctcgctgtgactctttgcctcaacacccccagacaataaaacaaacagttcagaatgggaacagaacccagagccctgtgaaggctctactgccaaactgtaaccccagcccagccatggaagccagtgctagctgtgtgtcctccttgtggccctcctctcagccttagttctcttaagttattcacagttccaacttcatctcaccagcccagtggtagccctgagaacgacagcgtcagtctaagaccagtaccagagagagtataatgaatgctattgtttgcccttcctcctttggccagtcttgcgactctggtaactccctacagaatcagctcaaatggctccgtttatcttaccttgcctttctcacgcctgaagccaccgccaagggtcatttattgaaaccagcaaatgttgtaacctttgaggcaatggatgacagtcggggaagccagaatatttaaccaaatacctcaggaagaaaagagggggtgagatgctctggagtgtaagagtagaacaggaagtgaaggtagtgttgtaactgcctggctgggagctgaaggcatgcctcagtaaagacatggaagtcctctgaacagactgagagagagtcttttattcagggtgtttatagaaatctttgtccaaccataacctgaccactaaattattaaacacagacattagtgtttgcacataacaaaagaaagttagctcacagaagtcagtaagggaacatgcgacaggtgtggtgtagccataagtcgggatctgtaggtcagggcaatctgaaatccagaacctttacatactgggcaagaactctgtcactgagctacaggtccagctttcctgactctaccttttccagacagtttcactaactatcccatgctggcccagaattcactctgtagtcaaggcaggcctggctttgattttaattttggtggcacaggcctataatcccattgctcaagaggctgagacttgaggatctgaactgcaaagctactgtgggctacgtagtgacagtgtctgaagacaagaaaaagggaggggacacgtcggaatgaatatatcaacacaaggattctgacacaggcagttcagagaatcaccttctgtttgattaagttcagaaagggggtcttgacttttgagggcaaatggcaaattgactttgagcgtggcaggttcaaattgaagactgtgtttggctgataattatgatctctggtagatgcctcatgagaattcagggctagacctagaatttggacttcccactctcctcaaggctgtgcctaatctttaaatgagacggaaccacttttcgtttccctaaagcaccgagacatcaggacatggtgtctgggagtttgaggcagaagacagatgcggcccaattatgtttgtttcaacacgatgcctgcgcttgcagagtggaaggtggataggaaaggggtttattaagaccagatagtgggatgtggttgctgtttctgtgttttgccttttggcagtggctctcctttaaaaaacaaaaaatagtaacaacaacaacaacagcaacagaaaaactcactcagtttttcttttagataactttcccctgcctctgattttagggtttattaaaaaaaaaaaaaaaaacaacctatttttgagttcccatgagatcacagtatcagttcactctttctggtccatgggtgaaaatgcccatacaaaccgtgtttcatggttggatcaaagaactctcccctctgctgtgtctacaagtagactttggtgtcagtgtctcatcaccttccaaattatagctttcatgtctgcagtgagggagtaggcagacatgcagtaacacagccaggcacctgcacctcagcaggactggctgtgttcatactagaacaaatttccaccagaattatgcatttgtttgagacagtctcactacacaacccaagctagccttgaacttttgacaatcctcctgcctcagccttctaagcgctgggatggcaggcctgagctggcacccttacccatgaagttttacagtgagatgcacagcaaactgccagtagcaagttgctaagactggatacagttgtatccatgcatgtctggttagctctcagcataatgtttagactttgtccccagcggatcatgttctcagagatgctaaaaaccacgagaaaaagattgtttattcattttttatatatggttatggaaaaatatacacaacaatttttaaatctaattgtaattttgctactttatgaaccatagtgtagttttctgaaacacaggatagctgatataaaacccctatgaaagggtcgttcaaccctcccaaagaggttgagaatcactggtctagaagtaagcacgtgttcaatattattaagttttatatgtcagagcaaaactcctaccacagaataaaaggcacacacatggctgtgccacatccaaccaaatgtccaactcttacagaactctggtgtccttccccccaaacaactctctcttcctcagccattatcttcccctcaggacacctgctccatggtccatctaggaaatggaggcattgccagcttcctgtttccacccctcagccagtgcagcctcccacacacatggaaaagaacacttcttaaattctttgggctgtccccaagttaagcagccccaagcaactcagtactcttgtctaaaagaaggagagctggtggacagatggatgttcctattgacagacacctcccaaggttccccatcttactctcctttccagatgttccttaggaaagcagtggatatttttaaatctctttccgttttgactcatcctgtttctcatcctccacatacagtcggggtctttgtccatttgttttgatatacagtctttctgaatagcctaagctggtctcaaacccaaaatctttctgcctccgcctccccagtgttcgcgttataggcatgaaccaccacacccaaaccatggccagctttatggcagtcacttagcttctttagttgttgtttctttggctttggtgacaccattctctacaggagtctttcagcttcaggctcttttatgggtgctttctcccctgcctgcgttgggctccccagggtctgcctttacctactgttttcctctctttttcctgtgtatctcttccgttcttatgatagtggccattgcatatgtgcctgtgagtgctttccaaaccggcatgcatctgcgttcagatgcctcccacttggcctgccaggggttgccccctcagtgaatgcattgcttcttcccatccagccttcaaatcatctgctgatttggtttctctcttcactggatgtgtcaggcttcgggggttctcactcacaggggagctcagagtccatatatggatggacctcaagctcatcactttcctgcctcaagtcctccagcactctcagaaacgattaatcaatccaattacagttcatatcctcacgaaaatacccgacagcagcaagtccttcttcccccacagctttaccttctatggcagaagtctgcgagctgtgcctcctgggccagatctggcttgcttcccgtttttgaaaataaagttgtattggaacatggccatgtccgtccacatacatattgtctatggctgtttctgtgctacaatcatagtggtgagtagttgccacagagaccatctggccgacaagatctcacatgcttacggtctgtctcattttcagagctcattttccctcaaggttcctggatgcctagcagatgtcaaagttccctctcagggttatagcgaagaaccaaaatgtcttgaaatttgatattgtaggacttagaggtgtgttgtcattgtctggtgccggaatgtgaggttgcaggacaaggagtccagaagaggggatgagtgtaaagtgggcaagggtaaccaaaccactacctagaacccacaaaactgtcagtacctcactgtgctcagctatgctggggtggtatccccagggactaagtgcttgcccagttctgatgttgggaaaccccaggaagctctctacggaggtgggtcagctatagactgtggcctatacatgccaaggggcagagctagcaactagtgacagtggatattggcaataaaatgcaggtcctttgtaagagtagctcttatgagctgtccctccagtctgtaccatgatctcaaatccatttgaattcctattttcaattattctggttttatttccaggaatagaattgttggagcctacagcaattctattcttgatacttcaaagtgcctctataggttcttggtgtctaaagcaagttatgcagcctcaccaactgtgcacacagcgtctactttctctgtgtctcatttgtaaagaatcaagatatacaagcaaaggaaggaatatttgccaactcagtctcgggaagcagagacagggcacaatggcatccacttgactgtccactcttttcctttttattctgtctgaggcccctgccccatcgtgggatggttccacttgctgtcaggatgagtcttcccccactaccccccagtcaatcctctctgaaaatacccttctagacacagccagaggtttacctcaccagtctcctaggtgactctaaatacagttgagttgacagtgaagattaatcattaccttccacataattaccagcctgtattacaagatttagtggcaaatgccctcttgctgtcccttatttctttgatttatatagcaggttttactctgtgggtctgctctgtatttcctttagactgatggtattgagcatctattcgatacatattttttttcattcttatttgttaaaattgtgtgtctgtgtttgatgtgtgtggcggggacagtgggcacacacataccacagtgcaggtgtagaggtcaaaagacaacgctgaagaatccgtttcctatttccgcgtcctgcttccggggattgaactcacaggcatcacacagtaagtgcttttgcccactgagacacttttcccagccccaaatgtaaattttctttggagaaatgtctgtttcagtcctctacccatttcccaatcagatccgttgttgtagagttgttggtgggtgttttttttttggggggtggtggtagtggtggtggtgaggatattagcccttgactaagcagatgatctgcagagagtttctcctagtctctagattgcttctttcccttgtttgctagtgtccttttgtacatgggtgctcataagttgaagtgtgccacttatctattttttgttttgttgtgtacgttgtatgtgtcatataaaaaaaaaatcactgaatgcccagccgatgcttcctcttctcatgtaagggatttaaagttttaatgctcctatttcagattttaatccatgcacattaacctttgctgagattactcagtgttctaaggtcgttggaaattgtcccccctgcttcctttcaatgtccttggtgccgtcattgaaaataatttggccatgtacatgatggtttgtttctggcctctcccttgtatccccatcagtccgtaggtctgtcttgatgccagtacctcactgttcagatggctacggctttgcagcaacatctgacaatcaggaactgcgaaacctgaaagtttctttccctttcacggactattttgactatcagggttaccatttatatggggttgtgtttctagcttttgaaaattaagtgaatattaattttattggtaacaaactactaaaagacacatttaataggaagctagccaaatgactccctatgttaccaaatcatggcttttttttttttttttttttttgccaagtccctactttgtaccagattaatctccaccccctttcaggtaattcaggttctccatatctaacttctgcagtgttcttcttccctgatatacccctttcttttctcttcctgacctttgctctctaacttctccactaatgcctgaccacttctgtcaggatagtatcccggctacctctccacacctccctgggcctttgcccctgttctcactgctgggactacttcccatcgttttccaggcctcacagtctccttggctcttccagtaggagttaggttacgtgtcattttctcccagcagccttagtttctgaaaagatcgtgtcttctcatttctgtagcccccaccctgtgctgtgtggataataaatattatgtggtaatcttcagtagctcttcaaaggcaggagctgggttttcatgtccctccccctgcccctgcgcctcccccccccaccccgtgtataaacacaattgatgttacacaaataaattctgttaaactcaacagaactaaaagatgttggagtcacccaggcagaggcctgccactgggtgtagatatcactgctatgggcaaaaggaagaacagtgggagaggccccatggtgctctggggggccaggcacattgggactcagaatgtatgaacacttgctacagaacagcactgtcagctgacttctacagagctggcttggaaagttcccttcttgtcaggtcaccacacagaacttgtattcagaaaaacctatgtaaagttcaaggccctcgaaaggccactgggcaacagtccaattcttctgtagctcagtagccttttcctggaggaatgccaggggccctgacgaccttttcattctccagggcatttagattggagacatggttttggacaattctaatttcttgagactgtagatactgtggttgtcacacagatgaaatggccttaaaaccgatgcagacccaatgggcttggttcccggggcatccaaggagaaaaacatacatgtaggacatattgtgtggtggcaagtgtctagcccaaagatgaggggagtaggttggctcagcagccaggatgaaagagagacatgcttatgaggaaatttcctcagaccctactgggatctatcagtcacagactaacaaggggtgtatggaaagaaggtggtaataccaaagcttccaaaggcacacaggccattcgtgatgactttgccaggccaccaccccctcccacatatggtgaatgagagcaagaatgattatgtttttcagcgaagttgtatcatctgtacacatggtaggcctgtggggggttggggtgggggttggttttcagctgaggactgacctcaagtctatgtattctagacaagagttcttggatatatttaaaggcaaaaagtgcatgcatatatatatatatacatatatatatatacatgtgtgtgtatacatagatatacatatacatatacatatacatacacatacacatacacatacacatacacatacacatacacatatacatcatatacatatacatatacatatacatatacatatacatatacatatacatatacatatatatatgaaaaggacaggagagttatgaatctcatgatgaccttcaatgttctctttagccaaggattgtgggtccgtgattcacccactgttggagttgaggtgttgggcacagctgctgaggaggcaacatgtggggagtgtttaactgtctccctgtgtcaccactatccagtgctgagctttagggaagcatccaaacactgctcagggggtgggaagacatagtctaagatggagggggccaaagttggggttccctgactcttgggcacccagtcagcactggggtgttgcacagaagagtcagaaacgaaggatgggagtccatggccccaagatgagggcatggaggcccgtgtgctgaggatgaattcgatgatgaacctaggcaggggaaatgggcgactcaggtttagctcatcagtgaaggtagcaatggttgtctggaagcacagagaggccttctacgggagacttaggctgcagctctgtaggtgaaggccttctccatgctcctgctcctatggtttcaatggaagagacagtccatgtttatccatactatgtattgactgttcatcatgggagatggatgtgtatcaacttctcaaggtgggccagagattaagtttcttttgcaggaggaatgtccaggaaggagagcttattggctaaaccctcggggcctcaaggtatctcattagcacggtgaactctgttttgggctacttgaccagcatggggagtgtgggcacgtgttccagggtaggaatctggcagggagcagggaggtgcctaccatctctggtgtgtacccaagtgctagactctcagacctgctctgtcttaccaagcttcctagcatggtccactgtcccacgaaggatgaccttgaacttttgttcttccttcttctacctcctaagcattgcaatcataggctgtattactacatgtagtgcatgcggtactaagatcaaatccagtgctccatgcatgctaggcactctaccaatggagctgcatccccagcccaagaagtgaatttttaattagcagtatcaaccaggcatgcttaatttttggctccagtcattcttttttttttttaattgtggaaatgtcacatgaactaacaaagaagttgtctgaaggtttctttttaaattaaagaatttaagaacactttaatattcaggcatttaaagaaaatgataagactttaatagtagtaagggtatgtggttagaggaattaccttgaataagtcataaagatcactcctattttcaccctggttgtcatggaccccacgtggctcgtatcccttattatgccagtttttaaaaaaattattattattaagatttgtgaattccaaatcagacatgtcttccttagttgtggtgaaataaaactgattttcttgaaattgctcttttagacactgtaagtttaaattgccttctttctaaaattttccaagtcatcacaaaaggcctagagttctctgacagtttgctgtaagaggcttcacggtgctacatggactttttggcaaacatggctttgatttctcccagagagaagtttcccctttaaaagcctgctctgtgatcataattgatcacagacaagcacctgtgtcataattgctgctgacatagcagcccgcatcaccggaggatgcctgggtgtcagcttgccttcaggtgctcagctagacttcatcaagcacatgtggagagctctgtattaggttaatgtgctaacattaacactggtgagcaaagtatgatcctcgtgctcaaaacgctgagaatccaggtaagcagagcagataagcaaagatgcttacggcccttcaatcagtcttggactggaagtgaatgatcagagttaggagacgatattatcccgacattggataataagacttttaaagtgagtaggtgactcctgatcctagacctagagggattagtttaactttaccaagaatgagtggaactggtgtctgtcatgttatatgtctgtaatcccagcacttgatggccaaggcagaatcatgagttcaaatccccccatcttgggcttgtcagagagattgggttcgggggtaggggagagaaaggggagaattatggtaaaataggacctaactagatggctcagcaggtataggtacttgctgccaagcctgaggacttgagttcaatcccagggacaccacagaggaatcctgtaaggagcctactccttatacaaccacgatcacctgctcaggagtggcaccacccacagtggtctgggccctcccacatcaatcattcatcgagaaaatgcccccatagacatgcccacaagccaatgtgatggaggcagttcctcagttgtaattctttcttcccagatacgttgaggtttgtgtcaaactcaccaaaactaaccacaggttagaattgaaacatgacctcaccctaagaattcagaccccagtgacaaaaaggaatgacaggctgaagggtgtgtgggatgacgtggcttcaaagaccaagagattaaccagcctctgtcgactgtgcaggataaaaaacgttcttctttcctgagttcaggacttagttgcattcacggaatagcaaatgttaataaagctaacacctagtaaaaagggaggacaagagtatggcttatctggggctgggggctggggtagagtgggggactaccttcttagatgctgctttggtatcctcacctcagtgtgcctggctaagatcactgtagtcttaggaatctggaatgctgttcctttgctgataagtcattctcctaaaaaaataaataaataagcagatatacaagacaaaaaaaaaaaaaaagtctagcccttttgctggtgtaagcaaagaagacagatgctcgaagcacggagtctaaagaactcgggagctgacaagctgtgtctccttggcatagaggatcccattgccataaatggaagtggcgtttcaagtgttgtttttgccaggtctcccggacttaaatggaactaaatgctcttgcaaagatggagaagagaatgaaggagaggagggggcgtgtctgggcatggaaactggctgccagcccttgctccagaggtccaagttcaaatatgcttgcaggcaagcctcagttaagtttttttgtcctcatacaatgaagctgttgtatggccagaggctggagcaggccactggctttccagagtccaacagccagcaccttttggacttccccttggttctccttctgttctagaggacacgaatacttctcatccaccctggtataagctctaggaagcaggagatgcactgctcatgaatgagagtctcagccctgttagcacgcagcttcaggaagtgacagagcaatcagatcagataataaagatattcagtagatcaagaagccattaagcattttgtcctgcttttaagcatttgccctgcccccaacaaccattttagatgatggaattcctggactgcttggttccttttgctatgtcagtttaaatttgtaagctccccctacaggaatgacttgactagatgcccatctgatttttgaagtccagagggatttctgtgcctactgctcgcagacttaatcagatgattcttgaaatggccctgaccctttcgttgggaacaatttctaaagtgataaattttctccccaccaagcctctaagtatttctccttccctccctcccttcccccttcccttcctctttcccctgcactcctccatgtgttcatgcttgtgtatgtgtgcatgcatgatttctaaacagtaaatcttaagcaagttgttacaaaagacaataggattagaggtgagagttagtagaggcatttaaccacagtgataataaaatgggcatttatttggttttgactctgccaggtactgttaaaggtacttaatgaattgaattcatataatactcagtgtgactctgtgttattatcatcaacaccttaaaaatggagaaactcacaggggaatgccagggccaagaagtgggagtgggtgggtgggggagtgggtaggggagcgggttggggacttttgggatagcactggaaatgtaaatgaaataaatacctaataaaaaaaaaacaaaataaaaaaataattccaaattttaaaaaatggagaaactgaggcacagaagagtaaagtcacaaagttgctagatcattgagtctggctcccaaatccattacttacagccaaaatgctggactgatttacagtgaatggggtgttacctaagtttcatgcctcctgaattcaggagagccatgactatacttctgggtatagttcctaactattcatcacctttgtgttctgatcaccaggcatatgtaggaaataatgggaggagaaacagggtggagagtaaggggtagttgtgtcattgagagcacacacctgaccgttcatgtgctcatatatgcacatacttatttattattcatctaaagaaagtatgcatgtgcatttgcatagatgtatatgcaagtgtgcatgggggggggagcagaagtcaaccccaggtgtcatcctcaccttcttttcctttctgattgaaactgggccttgtcactggattggatcccaccaagttggctaggttggctgtgcagaaagcttcagagatccgtttttctctgcctcctcagtgcagggattacaagcccaggctcacacctaacattttaaagttctgtctttcttttccaaacatcagttctgggtattggacacaggcctttgtgccttacaaggctaacacttacagactgcactatccctgtagcctctttttttctttgagatgggttcttatatagctctggctggcctgaaacttgctgtagagctgagactacccttgaacttgagaagctcttgtctccatgtgcttggattgcctgcattcaccaccatgcccagctctgcctcttttttgtatttgcgtcatttcggtactccctgagactttctcggcaggttatacatagcccttccccgagggatcagtttttcccattccaggtcatgggaaggggcaaggaggagaagacttccttttcaagagcctgtcagaaaaccatgtttggaaaggaacacatgaaaattgatcagtaaaaacagtcaagagcttaccagtcctctgtgtatgacagggtgccctcagcagctttagggtatagggggagaccagccctgctttttttaggaactcagcattgagaaaaccagatatccagggtcccagggtcaccctctctggccctgtcatttacccatatgctatctttataagcagcatgagtgttttacctacctgcatgtatgtatactgcatgcagtaactgcagaggtcagatgagggcatggatcccctggaactggaattacagatggttgtgagccactaggtaggtgatggaaactgaagctgggtcctctgaaaagcagcaagtgctcttgggcactgagccatctctccagcactgcccccacatccttttatactgttttatacttaggacttaaaagaagatccaattcttacacaaagacaattgaatgtcctgctgttattatgctgtatgaggttgtactggtattcaaagatacatttggtatgttatgagatggcatatgcttgtattcatattgtggtcccatttgtgtaacaaagataaaaatacacaaataacaataaaatatataatgattacatctacataaccaggcattactttaacttattagtctttcaaagaactctgtgggtgccaatgagatagttcaatggtgaaagtgctttgcctcctagcctgattatatgagtttgattcctgagtcccacattgtggaaggaaaaaactgattcctcaagttcccctctgacctccacaggtggcatgtgcacaacacacacacacacacacacacacacacacacacacacacacacttttttcaagtaatatctatatagtagatattactattatatcaatcttatatggataaactaatgagtagaaaggttgccacttctttaatgttcctgaaatagtaaatgacaaggtcagaattcagtctcaggtgttacggttcccaagggtctactattagccaataggctaacctataagtggtgtgtaaatgtaaacaaaatctaaacagacacacaacaaactgtcattagccaagaggtatgaaagtgggttggaaaaagaggaagggatattttctttttacaaaatataatcctcccccactttggcaatgctggggatagaacccagagctccattgaaggagttaccctgaaattagattatgacttatttacaacgttgtgcttcttccattaagggatacaaacggctgtggagtcagtgggaccttaggcaaagggagagagcccatgggatctgtttctaagtagggagaatgagaactgggtcaggttgataagtggaaaggaaaagaggaatgtgaggagaaggagaaagaactgagcagctgaaagagtcagcaaagaaggggtggggttcaatctgtgagttgatgtgtggccaagaagtagatatttaacacagtcaaccttaaggacccacatttcagtataaagtcttggggtgaggcagatctgtgtatgcaggtcacagaaatgaagtatttagcacatttataaaattaatcagtaattgtaattttctaggtgaggtggagagggtggtcagagatcccttggaggattccagtcagaacagggttggcttcactctgaggccaactgctgatttggagggaaggttgatctcctgtctgttgattattatggatgagtagcgtcgcccatggtcacagaagcctgtcagggcaggggtcatgcgtcagctgttgggacacttagctgccctggtgacaggcctctctaacctggtcccgtgccagcagatcccagcagctcttctgcctggtctgctatcaagctcaaccaccttcgcccttgaaccaggctgagggctttagaggaagggccattggtacacagcttcagacaatgctcagccctggaaagtgacccaaagcagccttcaccctgctttccagggcctgggcagaggccactgttataggaaagactgagtcttcagagaaaggtaagtctgagaggactgtcagcaggcccaaggacagacatgcttacaatattctaataactggagtctttctggagtaaagacaagactgggttgtccccccaccatcaccaccacctatgctcagatgatcttcatcttaggacacggcacgccttcctttgacaagtgaagacgtatcacctctgtcaccatttcttcctcaaatagctgctaggatagtgacgacagctgttttctgagtgaatattgtgagtcaagactcctacagaacattcttcacaatgagacgctaccttattttacagatggtgacatggagacttagagatgctcggagtcccacttatttgtttcaggggtaggatttgaattcaggtctgttctgatctgaatctcttaaaactgtacattgtgtttccccagctggtcctttcaaacatggataagagtggcatttgagccaagcaccctctaacgagtgagcaaactgtagtataagcatgtatatgttacagggcacagtgtctcctcttccctgccttccctgctataagtaccacttgtagacatgtcgtagaagagacactcactcagcttctaagtaccatgagctcctagaagactcaaagcctcaatcttacttccgtacgtctagaactgaattcacgccagctgtgtccagcggtctgtgaggtgtgccaggctgatccttctttctttcccgtgccaagccagaggtcctcttgcctgaacactgctatctatccatcaagatgatgggcacctgagacatgtatctctgccgacagcgtctactcctggcaaagctcatctgtgtatttgtaagagccgggtgtgatttccttggtcttgagtgtgggatctaagccacttgaatcaaggtctcatctttacttaagttatggagtcccccagaagggcaaatgaggatgattctgagaaaagagacttcacagctggttcagtctttgcgtgggtagaaatgcactcactacttgtgagtaatgtcgcagacagtactgtttacaacacacccccagatagacaaagaacacactggagacttttacttctgaccaagatagagtaagaggagccaagtttaccttccatgtcataaactggacaaaatgcgtaagacaacagtattctgatgctaatcttatcaggctgttttggaaagcgcttcctaaggaagcaaaaacagaggaagtgggacttgtagttagcaggcttgctattagggaagttttccatctgataggttatttctgcactggtgaaatgagccaattcaagccagattagattatattaaaggcaggtttattgggaagctgctcgggcaagttccctggccccaaggattccttggcagacttagagccaagtctctctggaccccacaacctctcctgactccattttttttctttctctgcttgcctcacagaataccttccctcccccaccccttgagacacaggccaagggccaccttctcccctcttacccaccccctcctcctttgtctcttcccactgtcccttccttttccttaccctcacaggctccatttgatggtcaacagcttcccctttacccatctcctccccatcctcttccggcctcgatgcttactctgctctcttcctcttctgtgacctcacaccccccaccctggtctccatccacacactggcctgctccacaaggagtgtctcctgtggcatctcacacatggtccaaacaggcctctgctctcctctgcccactctgggaggtggtgggagctaagtggtttgcttgagtccatgatcctttttctctgcaggacctatccccaggttggaaacggctaggtttcttctctgccaacccatccgactgtattaaaaggttctgctacctttgccaggcctatgacctaacttgtcacgacctttatgtcatccaggcttccacccttcctcctgaggagtgtggatgggttcaggcagctgccaggcagtgtacagaccagacccaccctgtgggtaacaaggtgacaccatctacagaacccaactggaattacctcttttctaaatcgattaccagagtccatgatcctatatacccgcctgaacccagcctcctcagcgggggacgggatcattgatactcattttacttctcattcttgnnnnnnnnnnnnnnnnnnnnnnnnnnnnnnnnnnnnnnnnnnnnnnnnnnnnnnnnnnnnnnnnnnnnnnnnnnnnttagtagcttccctgaggccaagagcatccctgagagggaagagggaggtcggccatgcccatcctgctggggtcaggcctaagccaactctgccaggaatgtgttttaagtgcagtcggtcaaaaaggacattggtctctcagctgcctcaacctgaggcagtccaccaagccatgccctgcctgctgacagcatggtcactcaagtcggaatgccccaaagctatctcgccctctgagacccgccaagtaggcccaggtcagcgcaggtcccttggtcccatcaccaaatttccacctaagaaccctgccacttccctggattcttgcaaaacgatttctttcacactcttttctggtcatgcctgtctgcctaggttcgatccctgagttttggctccatctgttaggttatttgtttgccagtgaaatgagccagttcaaaacagattagattatattgaaggcaggtttattgggaagctgctctcagtcgagatcgctggccacaaaggaccaaggccaggggaattgccatggagggaaaagggaagagaaagggcagagagaagagaaggagaagagagaggaagcaagagaagccaaaatgcctggattatataggaaagagcctctgggctagggcagccctgccctggggtggtaaagtttagggttggggtcagggtatgacaggtagggactgagagatgctgggagaacctggaggccaggtctgctttgatatgtaaaatatgcacctcagtgccactggtcctggggtggaaaccatataccattgtggtgcagggaggagaaaggcaggtagtgggttcaggacaaggaactgggagctgatggagacagcagaggaaagcactggaaatggcaatgtgtcccagggaacgctctgggggatcagaagttgcctggtcagtgcttgtcagctcacacatattgggaatttagctgaggcttggggagaattacccagaaaaagccagagtggaaaacttcatagttagtggggtttggggtgagagtgcttagaaagctaggtccttagtcatgggtcagaagtatccctagacaaaaggtggttgtgatttcccctattaacagaagcccagaaaggacaaaattattcccaagtaatttagctgtgctctagaaaatcaggtatatttatgagatgacataaatgtcttaatactaacaagacaaagtctaccaggcctattatccaatccaaaacatagctggaatagagagaaacaggaatacgactaacaatgagggccatccaaacagagaccagaaatgacacttttgatggaattcgtagataaagtttgtgttgtttttggttttggtttagaccagggtcttctgcaatcaagactagcctggaactcacaatcctcctgcaccctctgaagtgtagggcttgctggtctgtgccgccctgacagttgtcaaggggtggttctaatgcatcctctgtcctgaagaaggcatagactgagcatttggaggacagggaagacggcaaaaagatagctgggtgcggtgagatatatacacatgtaatcctaaaggtttgcgaagctgagacagaggaattgcctcaaagtggatgctgcctgagcaacatgttttagtttctcttccttctgtggtgatatgaaatactctcaagaaaaacaacttaaggaagagagagggtttattctggctcagaggttacagtcttggcagggaagccaaagcagcaagagatcttcagccaatcagagagcaagctagggaatggtgccacccacagagggtcttccccacccgattaatctaatcaggatcttgtctgcctacctcagttaacagaaacaagatactttcccacgggcatgcctcgaggcccatcacccaggtaattctaacttctgccaagttgataattatgtaacttgcttcatacaaagcaagttccataccagctagagctacaaagcaagactgggccttaccataccactgtacctcacctcccccatggagaataaaaccacaatcaaacaaaacaagcaagcaagaaaacaaacacaaatttgtcttatgggcctataaaagaacacccaaactgggatgatttgcacatgtgaagaatttcctgctggtgaggactttcttgattacaagacacctgggtaggaagaagagcaaaagtgtgtgtgtgtgtgtgtgtgtgtgtgtgtgtgtgtgtgtgtgtgtgtgtgtgtttgtgtgttggttgttggggagtgtggaatacatccttttactaggaactcatccctacaactcagacaataattcttgagagcatcctcatgacttcataagggcattccttatgttctcatttatccacaccattgcgcatgtacagtgcagaacacatccaaagcatagcacaattcagcagcaacaataccattcaaaaatgactttttcaaggggctagggaggtgtctccattgataaagggcatgcttgtgcaagtctgaggacctgagtttgactccccagatttcatgtacgaaagtagggtatggtggcatgcttatataatgccagcactggggaggcagagagaggagaattacagcagctttctggaacccacagagatggacccacacatgcagctaactgatttttaagaatggtgtcaaagcaacggaatgggcagaggacagtcttttcaaccaagagcactgaatgcaatcaagtgaagttcagcccttaccttacaccatctacaagccaacttgaagtgtatgtagacatgaacgcaaagttaagactgtggaacatgtattaatctatactgacagaccacgggtccatagagaatgcagtgaggaagagtgagggagtggttatgaagagaaaggaagagactctgggagacatgcttactttggtggttgtaatgagtgatagaaataaacgtatgccatgatttaccaaaatgtgtacttcatgtgcgctgcattgcacatcaatgcaagtttaaacaaaatggaattcattttagactgatactcactaataatcagacaacccaaataataatgcccttcctatgtgctgtggagcccgacatacccattttcttccacttaaactgagaatattccatggtcttgatccttagcgttgacttcacaattcaacacctgcagtttgaaaacgtcatgttaagatgtaactgggaagagaaggatttcacagaaatggcctcatcacttcatggaacaagccctgcagaggcagtttctgtgtcattagcacaaatcttcctcttttctactgtctatgtagttgaggcatcaccaagttctaccattcctagaagtgccagcctttcgaattcttggctcacagactctcttgctacttactgtctgacctgggcgagggatcaccacttttatgaaaactctccgttgtgaggagtcgggggtccttgggggacactgatgcagaggctcccgagattgatgactgcatagttgctaaaggtggcgaaggccttcagacttcagccacctgctcttggctgtttctctcataaaggaaagtaagccagctccggcaagaatcccatctctgaaatatcttaatggtttcctggagaggttacttgcagttgttgctagttttgccctcaatatttgaagatggaatgcaagaagatctggcttgctaatgtacagcacatgactatagaggccactaaagaagagggaaactcatgaagccattggaaggaagcagagaaaaacaaaacaaaacaagcaataagggaaacctaggcttgggatagcctcattctaccatgaattagtgctccggtaacttaataattatgtgcctagtggtctcttcaattacacatctctcagtgtcacaaacagtggtgtaatttgcccattaggtccaaattagcttgggcatggtggcttatgtttgtaatcctagcatttggcagacggactaggctgtaaggtgggacctgtctagattccctttctgccaaatgacagactttgtttttttttttttaatatatcttaagtacactgtagctgacttcagacacaccagaagagggcatcagatttcattaggggcggttgcgagccaccatgtggttgctgggatttgaactcaggacctctggaagagcagtcagtgctctcagctgctgagccatctcttcagcccaagactttttttaaaaaaattattttatttacattccagctagtggtccccttcctggtcccctctcccacagttcctcatcccactcttcctctcccttgcctccaaaagggtgctccctccccagtcctccccctttactggggcctcaagtctctcaaggattaagctcagcatcttctcccactgaggccagaccaggaagtcctctgttatatatgtgctgggggcctccaaccagcctgtgtgtgctgcctggttggcggctaagtctctggcagctccctggggtctgggtgagttgaaactgctagtcttcttattaaggtcactctccccttcagcttcttcttcaatccttcccctaattcaaccctaggagtccacaacttcagtccaatggttggtgtaagcatctgcgtctgtcctagtcagctgatggtaaggcctctcagcggacagtcataagagggtcctttcttcaacctcttctccatttttgtcccttcagttcttttagacaggaacagttctgggtcagaacttttgactatggattagtaacactgtccctccacttgtggccctgactatctactggaggtggactctttgagtttcctctccctattgttggacaatttggctaaggtcacccccattgagtctggaggacagtctctcacctcctagccctctgggactctctagagggtccctgcaccacctaccctcgaggctgcatttttcctgtctgcaccccccaacacacctgatcctgttcccttttcccttcaccttctctcttccacccaggtccctccctccctctgcctcccataattattttcttcccccttgtaagtgagattgaaacatcctctattgggcctttctgcttgttacacttcttacggtctgtgagttgtatactaggtattttgtacttcttggctaatatctacttaccaatgagtacgtaccatgaatctgggttacctcactcaggatggtattttctagttccatccatttgcctgcaaaattcatgaagtcctcatttttaatagctgaatggtattccattatgtaaatgaaccatattttctatatccattcttcagttgagagacatctgggttgtttctaccttctattacaaataaggctgctatgaacatagtagaacatgtgtccttgtggtatggtaaagcatctttagggtatatgcccaagagtggtacagctgggtcttcaggtagaactatttccaattttctgagacactggcagattgatttccagagtggttgtactagtttacaatcctgccagcaatggaggagtgttcctctttctccatatccttagccattctgattggtgtaaggttgtatctcagggttgttttgctgtgcatttccctgatgactaaggattttgaacatttctttaagtgccttctcacccattggagattcttctgttgtgaattctatgtttagctctgtaccccatttttaaattgggttattttggtttttggaggtttgcttcttgagttctttatatattttaaatattagccctttatgggatatctcgttaatgaagttttttccccatctgtaggttgctgatttgtcctattctcattcttctacatatagactgccagttagaccagcaccatttattgaagatgctttctttttttcccttgtatgtttttggcttctttaccgacgataaagtgtccataggtgtgtaaatttatttctgcgtcttctattctatttcattaattgatctgtctctgtaccaatatcatgggttttttttttttaatcactaatgctttgcagtacagcttgaaagtcaggaatgttgatttcctctcaagatcttttattgttgagaattgttttggctatcttgggttttttttccatatgaagttgagaatttctttttccatgtctgtaaagaattgtgttggaattttgatggggattgcattgaatttgtagattgcttttggtaagatggctatttgcactatgttaatcctatgaatccatgagcatgggggatcttcatgtcttctgagatctttgatttctttcttcagggatttgaagttcttgtcatacagatctttcaactccttggtaagagttacaccaagatattttatgttatttgtggctattgttaagaacattgtttccctaatttctttcttagcctgtttatcatttgtataaaggaaggctactgatttgagttatttttatatcttaccactttgctgaagttgtttatgagctatgaaagttctctggtggaattttgggggttgcttatatatactatcatatcaactgcaagtagtgatatttcgacttcttcctttccaatttatatgcccttgatttccttttgtttacttattgctctagctagaacttcaaatactgacttggatagatagtgagatagtgggcaaccatgtcttgtccctgattttagtgggattgcttctaattcctctccatttaatttgatattggctgttggtttgctatatattgctatttattatgtttaggtatgtgctatgaattcctggtctcttcaagactttcaaaggggtgttgtattttgtcaaaggctttcttagcatctaatgagataatcatgaaattttttttccttgagtttgtttatatagtatattactttgatggattttcatatattgaactatccctgcttttgaggaatgaagcctacttgattgtaatggatgttggttttgatgtgttattggatttggtttgttgaggattttattgagtatttttacattgatattcaattataagtgaaatcgatctggtgttccctttcgttgttgagtctttgtgtgttttaagtatcagagtacctgtggcctcatagaatgaattaggtagtgttccttctgtttctattttgtgcaatagtttgagaagtattggtattagctcttctttgaaggtcttgtagaattctgcactaaaaccatctggtcctgggatttttttttctttttgattgagagctttttaatgactatttgtatttccttaggggttatgtgactgttagatagtttacctgatcgtgatttaactttggtacatggtatgtgtatagaaaatcatccatttcatctatattttgtagttttgtttaatataggcttttgtagtaggttttgatgatattttttaatttcctcaatttcagttgttatgtctcccttttcatttctgactttgctaatttggatattgtctctgtgccctttagttagtttggctaaggatttatttatcttgttgatttttctcaaagaaccaactcttagttttgttgagtctttgtattgttctctttgtttctaactggttgattttggccttgagtttgactatttcctgcagtctactctttttgagtgtgtttgcttctttctgttttagagctttcagttgtgctgttatgttgcttgtctgggatctctccaactgctttatgaaggcacttagtgctatgaattttcctctcaacactgctttgcttgtgttctgtaggtttggatatgtggtttcttcattttcattgaattctataaagtctttgatttctttctttatttcttccctgaccaagttatcatggagcaggaagttgttcagtttccatgagtatgtgggctttctgttgtttattttgttattgaagtccagccatagtctccagtgatctgatagaatgcaggggattatttcaaccttcttgtatttgttgagtcttgttttgtgtttgattatatggtcagtgttggaaaaggtttcataaggtgctgagaagaaggtaatcccgtctctgattagagcaggcctcctatgtccctcgtagagcatacctcctgtgttcctggccagggtgaacctccatgtcagactttcataaacagtctgaaaccaagatgaaacttgggcagaaatcagagtgaccactctggccttagctttttaaaaacagtggctgaagttgtgaaagttaagaatggtccttgttcaagtctaagtggatcaaggaacgccacataaaaccagcgacactgaaatttatagaggagaaagtgggggaaatcttcgaagatatgggcacaggggaaaaattccgaacagaacagcagtggctggtgctgtaagatctagaattgacaaatgggacctcataaagttgcaaagcttctgtaaggcaaaagacactgtcaataagacaaaaaggccaccaacaaattgggaaaggatctttaccaatcctaaatcagatagggaactaatatcaatatatacaaagaactcaagaaggtggactctagaaaatcaaataaccctattaaaaattgggtacagagctaaaaaagaattctcaactaggaatactgaacggctgagaagcacctgaaaaaaatgttcaacatccttaatcctcaggggaatgcaaatcaaaacaaccctgagattccacctcactccagtcagaatggctaagatcaaaaattcaggtgacagcagatgctggagaggatgtggagaaagaggaacactcctccattactggtgggattgcaagctggtacaaccactctggaaatcagtctggcggttcctcagaaaattggacatagtactaccagaagatccagcaataccactcctgggcatatacccagaagatgttccaagtggtaataaggacacatgctccattatgttcgtagcagccttatttataatagccagaagctggaaagaacccagatgtccctcaacagaggaatgaatacagaaaatgtggtccatttacacaatggagtactattcagctactaaaaacaatgaatttatgaaattcttaggcaaatggatagatctggaggatatcatcctgactgaggtaaaccaatcacaaaagaacacacatgatattcactcactgataagtggatattagcccagaaacttagaatacccaagatacaatttgcaaaactcatgaaactcaagaagaaggaagaccaaagtgtgggtacttcgttccctcttagaagggagaacaaaatatccatggaaggagttacagagacaaagtttggagctgagacagaaggaatgaccatccagagactgtcccacctggggatccatcccatatacaatcactaaacccagacactattgcatatgccaacaagaattttgctgacaggaccctgatatagctgtttttttgtgaggctatgccagttcctggcaaatacagaattggaggttcacagtcatctattggatggaacacagggcccccaatgaaggagctagagaaagtacccaaggagctaaaggggtctgcaaccctataggagaaataacaatatgaactaaccagtacaccccgcccccccagagcttatgtctctagttgcgtatgtagcagaggatggcctagttggccatcaatgggaggagaggcccttggtcttgagaagattatatgccctagtacaggggaatgccagggccaggaagtgggagtgggtgggttggggagtagggcaggtggagggtataaggggactttcggaatagcatctgaaatgtaaatgatgaaaatatctaataaaaaaacaacacagtttatggggaaaaaaaaaaaaaagaatggtccttgtttcccaagatgttaaccttcatagtgatccttaaaaaaaaaaaaaaaaaaaaaaaaaaaaagttggatagatggatgctcaggccagatcttaggcacaagggacacaaggctgtaatgacagcttaatacattgaggtatcaaggttgtgctttctttatttaggaactaaaagcatggttccagagtaaacatttaagccttggttcagattcggttctgctgtgcctgccagcctctgtgatcttgggaaaacagcctaacctctataaagttcagactttgtgttcaaagcagcaagcattttccacccagtagggactttgcacccccaccctgaaatatttggcaagacttggaggcattttggattgtcatgatttggggagttgggactgctgttggtattcagtgggtagaaggcatgggtgatgctaatatccagtaacatagtagtacacaatagacatcgaccctcacaatgagaagttacttcgtccaaactgacagtggagtgaaaaccaaaaaatccctggcttaggggcagtgcatttagagtctgacacaagatttgtaggtgccaaattaacagtgctgtcattagtaaatgatctgtttagtgtggtttggttaaaaaacataaaacagacaaacaaaatgaaacacacacacacacacacacacacacacacacacacacacacacacacacacacaaaccaacttctgaaaaaggatcacccacctcttggtagagctcagaaaattctctataaacagtggtaactacagcccatccaactgtagcctgggtctagccaaaaggtttcaagtggaggctctggggcctgatatatataatttaactcagcctgcttgcctgtaaagtggccatcataatatctgtcttgtaggaaatccattaaggcatgtgaagggccagtctgcatagcatagcaagcattcaactgataactcgctattcttgcagagaagtggttagggagaacactaggaggagtgtttttaagaaaacatttgttatttacttgtagttgtgtgtgtgtgtaggcatacttgtgccacagcacatgtgtaatggttagaggacaactttcagggatcagttctcttctaccacggtgtgggttctggggagcaaactccacttgttaggtttgacagtgagtgctgttactgctgagccatcttgtcagctcagaagaacactgatttcaacaagagcctctaaagtatttaatatagagtatgaaagggactccaaccaaataagcaaagaatccacccagcagtagaaaccatcagaggacctgcaggaaaggagccaggtgttcataaatgtcatctccacgacttctcacacctctctgtatctctttgaatctcatttgacagttgtggaaatgggctcacaatagttagtcacttgctgaagatcacgcagctgcagaagggcagagctgggcttttgaaacactccctctggcctgtgtttttgtgggctgaaattcagtaatgttcaactcagggcagatctccagaacattaacaagttaggaggtttctatgttcagggaaaggaagtgtgaaagcctaacctctatctgctggcagcttggatatgtggagaggagagcagaaggctgctggcaggggcctttctgctttactgcagcgatagctgctgggtcccgtcaactcaccctgcaatgtcaggcagcacagagtcatccagagagagaatctcttagtgatgtatgagacctgctggccaaagacaaggagtatgggctcttaggttactcagcattcctccccaccacaaggagagatctttaggattcttaacctgtgggactcatccactttggggtccaatgaccctttcacaagggtttcttaagaccatagtaaatatcagatgtttgcattacaatccataactgaagcaaacatagttatcaatagcaacaagataatttcatgatgaggggaggtcagtacaacatgaggaactgtattaaaggaatacagcattaggaaggttgagaaccactgttctagaagattcctgagacctgagacaattcctagcaagtacagggtggtgtgtgtgtgtgtgtgtgtgtgtgtgtgtatgtgtgtatgtgtgtgtggtgagacagagccaccataacctgaataacgtaggctgtaaactggagaaccacagtagccttcccttatgcagctctatcagagagagaatgatgacgctggaaatagtgtggagtcttgagggcctaactgtgaagagactgtcccggcagcacttggggttggtgcagatgatagtgtctgtatctctggtgtcctgcaggacccctttgcctctcctggtcttagacaaatgcatcagtcacttttctcatcctttcaacacaataccagacaataaaacttaaagacgcaaacagtggttctgactcatggtttcaggccattgcagcagggaggttttggcaggagcaatgttctttacagtgaagcagtgacccagtgggacctggctggtataaacctttaaagggccacccatgctgacacatttcctgaagctaaacaggcttctcctaccgcctgcaaattatcatcaaaagctgggaagccagggtttaaaaattgaactggtcagagcatagttcaaattcaaaccattatcaaaagtgccctgcactgtccacagtaggacagcatctgggtgactctcccagctgcttgcccaccatccttccacctctggttctcacacgttccagctcttcttcttgaggcacaaaaataatggggctggaagctgtctcaggatgtttgggtcccacatatacagaaactgagcagaaaaaaaaaaaaaaaaacaaaacaggctataagacctcaagtgtcaacatggcccatgtgttctgtgaaaggtcctgctctgccctggccagaaagaaaaaaaaaaaaaagaaagaaaaaagaaaaagcactaaaagttcactaacctggttgtttaaatataggaaaggaaacagatgctggctggcggaagtgggttggggggtggtgcttgaagcctaacctctgctgatttgctgtgggacctttctgttgttaccctgggctatatctccctcagagctcctcctcatgatagacaagagagggttatttttaagctgatctttgtgacttccttttggcttgtgtcctctgcttccttggtagtcctattctggcacagcctgtcaggctgtgggaggtgagagctgtttttgtatgggcaaatggcaaaggctgagtggggagcccaatggtgccgactcggtcaggctgaacgcaatccctccaccccccaatggactcgtgacaggacagtgtggaggagtcccagcttcaggcctaaggcttagtctcagagtgtgtaggtagcacacagcatccacttcggaatcctctgaccggatccgtagtatccagataaatacaggggtgctactgtgtcctcaaatggtctgtcctccgaagagctcccctttctggaaccaggctgggctgccctctgtggtctccgaggtctctctgagttcctggggaggataggatgtctggctaggtgcacttctagcatcctcagactgtgtgctgatgaatcagcaacctgtcccagtcagtctcttcaccgtacatatcaaaggaggcgagtggagatctcggtagctcctgggggtgggggacggcctcaaccgagttcctgttgatccctctcacttcctcttgtcttcagtatatggtggaggccctgaagtgcagctggtgcccaatggctgcctgcgataatgcatgtctgtggtttctcgttcaacctctggttacctcccggaagggccctccttagtcttctcaggagattgctatggtccccagctctaatcagggatcacacagagccacaccctcttctgatttcaaagatctctctctctctctctctctctctctctctctctctctcatatcatacatgcaggctgaagcctgggagggaatagtttagaaattagtacttccttgccaagacccaagagaacacagatcaggtctcacagaaggtagaagtcttggttgagtagcccttgtgtagtcaggcaaaataagctagtctgtgtctttccacagtaactcccatgtgacgcttagaaaattctttccacttcagagtccatgtcaagaaatagttgggtttttgagatttccccctgcagacgaagagctggctctgcacgacctttctgttgggcccaagcttctgacgctcaacctcagctactgcagaagtgaggaaaatccagctctcaaagcagcagctggattgttgatctgctccaggccttgtgtcacctgactccagcagctgctatccaagcctctggcgagctacttagcctttacggaaggtgatgtggtgttgtgtgtgcgtgaccatgcatccctcctacctgcgccctcccttacttgccgtgggtagggcagtcatcgcacctgcttcctctttgggtctgtgaaatgagagccacttcggctttgccacatctaacatctaaatggtatttaggagaacaacagcatagctccttgacttggttagggccaggcaaggagttctgtaagtggaaggtgaggagggtcgtgaagtaaccctttaaaaatgtttattaatcctttgaggatcacacacacttacactcacatacacatactcacatagtcacataccctcacagacacatactcacacagagaaactcatatactcatacagtcacatacattcacacacacccttacacacaacatatttgatcatgttcactccctactcctcccctaactcctcccaagaatacgcccacccccaacccctcctaacttcatgtcctttaaaaaattatttttataacccgttctcgatgtccatatattagtgggtgtggatccacccacagtagtgtgattgaccttccaggggccatgcccttaaagaaaactgactttccctctcccagaaggacacgccccctgcttggacttaggtttctggagcaaccttcccttaggctgaccttccggcagttccttggagccccacccagccagcagctgccctcgcctcctgcagatgtttccagtttgcagattgcttggggttctctttggtcattcgttccatttgctcagaaacaacagccagcattcttgtcgggaagtgagagagtgccaacctcaggatgacacaaaaggccccagtcatgggaactagatagagatggggtgggggctggaaaggaccagagactggaccatctgcagtgacctagacttctgctggcctctgctgcagccggggccaccaaaacaacatctatctggcttccatctggcagggcccagagtgggtcagttgagtcatcctggagggttcaggtcagaaagagccattctcctggaggcccgggaatgactggagagtcattctggttccttggcccttcacagtcaggatctattccaaggttaatgaaaggttagaaagtgtttggtattcaggatcaagtgcagacacaaatgaataggctgcgcattaaatcgtaaattgtgtgccgtgcgtttcatgtctgtcaagcagctgttttggcaggaggtgaccataatattcatcaaccttcacaccctgcccagaaggtggcctttttatagccttgaaaagtgccaagtgctctgccacgccctccagaatgagtgacaggtaagacacagaaactgtggttatggttctgaatagggcgggctcttgagatagccaggcttcacctgcagcaacggagaggcccctgtggctgcgggtgctccatcctgcctgtctaggaactgcctgcagtcagaccccccaggctggcctctgcctgggctcacgaaggggggcggtctcatagctgaaccctggcacaagcttcttcatgcggtcaagccactcacttcctggcaagtagagaagataggagaagacgtcatcgccgtcctgccatcgccttcgggtgagtccagtttctgaagctcagaaaaccaacagaggatttggagcaaaaagcttcttcaacaaaagacgagagaaaggtgccaaggaaagccacatctagaccattccaacctcaggggcacagccagcctgcagttcacggttcacagagggtctgtgggtatagagacgcttcctgttggttcagtaaccagcaagcacctcatgaggagtcactggcccggtgcccatgaggcccacaggaagagcatgggtgcaggactctaagagtggtccagaccctgccccagatgttgggtgttttttacttctttcaggtcccaaagaataatcttcctccttcaccaaagaggaattaaagacatgggagattgggcaatgtggccaaggttatccgcttagaaacaaagctcacaaagcaagaaggacgtggcatgttcaacgtctgagtcactcgctggcagccagcccattttgatttcttccccggggctgggcctcagggcataaatgcagtgggacaggcctgacacctggaggcagaagccctgtgtgtacatggagtgggacaggaggtggttcgatgcgggaatctcaccgaggcagagaactctggcacaggtttgagtgctgaaggtctggaaggtaacttccagtaagaggtgatatgactggctggcacatcaacctggatggacagggcagggagactggccatgacacatacatgcagtggatcactgtctggttgggtggtcctagggtgttcatctgtgggctcagcgaggtgggcaccagaataaacaaggagctaaatgttctggctagccggttttgacctcaaaccagtcactttgggcaccagtttcctctcatgttcaattccacttctagcacacttgtgctctaaaatctcactgtgaatgttgatttgggacaagaaaagtgatgagtgtaacaccaggaacagttctaagccctacagaaaaagcaagaagaacagggccaagaacaaatgacagagctctgatcatggaacacagaaaacagggtgcccatggcatcagattagacaaatcacactgaagagagaatggacgtgtggtggtaaacaagcatagagaagccacaaactgtcttgtaaggcattctctctaagggcctcttaaccagactgagtaacataaccccaaaagactgcagggaaaagatgcaacaaagaaacaaaaaatggaccctctcgttcctctcagcttctgcccaacacagtgacatggttagcaccctcttgggctggggtgggatgtgtgtgggggtagggtggggacagacctgggaataatatatgcattcagctccaacataaaacaggtctcccatgttgccaggtgttataagaggctcctggaggtccaaagttgaataggaagtgggagaaacaatttaactccaaagtagcataaaagtgctcaaagagaggatagcataagctgaaatggaatccatagtgagggaggggccactggctgcccaccagcgcctttgatccttcttgggagttgattgtacatacaatggtaagtgggttctgcctgtgccgtgggtggcaccatcccggatacttctgggcatcagtgccccaagctctgttattgagtcctctccaagatactcaattaaaatgacagctttgccatgttttgtttcttgtttctagagacagggtctcactttgtaaccttggcagtctgctctggctttgaattcacagagatcaagctgcctcagcctcccaacttctgggattccaagcatgcatctggctgggtattttatttttagaattacacaaatccctatgggtgaatgggaagcaacaccaaagttccttctatgtgctcgttatttgtgacttgcagtcttcccaaaagcatgtgctcataataaaagaacagagcatgacaactaagataccaggagccagggctggagatttgactcagtggttaagagcatttgccacggactggagagatggctcagcggctaagagcactgactcctctaccagaggtcctcagttctattcccagcaaccacatggtggctcacaaccatctataatgggatccagtgccctcttctggtgtgtctgaagacaaaaacacagtgtacttacatataataataaataaatctttaaaacaaacaaacaaacaagagcaatggcaacttgtgatggtttgaataaaaatggctcccttaggttcataggggagttgcagtattaggaggtgtggccttgttggaggaactgtcactgtctcagaagctcaagccaggtttagtggcttatggtctcttcctgctgcctgctgatctagatgtagaattctcagttactgttccagcactatgtctgtctacgtgccaccatgcttcctaccatgatgataatggataaaacctctgaactgtaagcctgctcagtaaaatgttttccttataagagttgcttataaggctggtaagatggctcagagggtaagagcactgactgctcttccgaaggtcctgagttcaaatcccaacaaccacacggtggctcacagctatctgtaatgggatccgatgccctcttctggtgtgtctgaagacagctactgtgtacttatgtataataataaatctttgggctggagcaagcagggactgagtgaccaaagttgactggagcgagcagaggtcctaaaaagttcaattcccaacaaccacatgaaggctcacaaccatctgtaaagctacagtgtactcacaaatataaaataaataaatacatttaaaaaaacaaaaaagagttaccgtggtcatggtgtctcttcacagcaatagaaacgctgagacactactctctgagaggacctgatgtcagttaccagcactcacaccaggtggttctgagtgccttgtaactccagctgcatgcaagtgatgatgacttctggtctctatgccaccttcacacaagtgtgtgcacacacataaaaataaaaaaataatttaaaaaaggatactagaagcctgaagttgagacaatgcgtgcagcttttctagaaaagtcttttttttgctgagacaagcctggcttgtgctgacccactctgagctcctggctgcccaggaacaacctacgccaccaagctaatgaacagagcaggagaggtattagaagagcaacatccttcctagaacctcctcggggaaataggtctcttaaaccttcagtataagcaataacaatgtagtatctttaaccgtgatgaaatgctgagacagactctgtataacaatagctttaatgaaaagccgagggaaataaagttattgggggaacccttcagcgggaagtaaagtaatgtggtttcctgatgctgtctgcccatggactagatgcaggggtgtggggtggagaaggttgagggaggattggcaggctgccctccattactccacagcctaagaggaggaaccagaaaccagaaaactggcaaaaaagaaagaaaaaaaaaatcctgttctcagtagttctcagtagctggcccaacccatggatcatgcacacccttccacactgaagagcttctgcccagtcacagtttatgtttggtataattggtgttggcctattcttgtgtgattcactggaaagggctaagatagttgactcagattctggcctttacccatcgtagttgactgtaactgtcctccctccctccctccctccctccctccctccctccctccctccctccctcccttctttaagttacctttgttcaagattttgtcaaagaaatctgagaagtaactaatgcaggttcagatcccagctccgccacttgctccctgaaagccacctcgcaccaggctgtggtctcctcaccagtgaaatgagttagcagcacttacgattaagtttggcacacgattataagtgacaggtataaaacgccaagcaaggagcctgggctgtgtcacttagcaccctgtcaatggcagggttcacacactcgtgatagaaggaccttgtagagtaagagaagacgtgtcatcgaaggggtagaggttgctggtttcttgctctctccaggagaatgtgctcaattcatctaagggtagggtgggttgagaagaagcaggccaaggcacagccccactatacacatctaggactggcggtgctctatcccgggttcgttcctgcacgtgctagttagtgcttacgtaaaggtcactgaaaatgacatcaggactcacagttgacctgtgtggaatcagagatgaacttcagagactgcgggagtcccctacttgagtgaaaaaataccagggtgggtaattgaaggcctgaggctggaatgaggaggctgggatatgaagaggctcaaggacgtttggataagttatgggctttgaaaagatcaggacagtgaccagagggccctgtgcctacaggaggatgggttggggattggaggacatgggggaaggaccaacaatgcacaacccggtgagatctacttacggcagatatcacacggtagcagaccccttctgaatccaccctgtccttaagtcaggagaccagactgggctggtctccactgtagaacatgctctttagcagaacagacttaagcacattccttctctatttgctgagagttcctgctttgtggagcaaaatgcaaaactttttttgttaggctgttcatgctccttgccagccttcttgagtccagaggatcagaatattatgtgggactagattggactgaccataggcagcctacctaccctccttgctcctggtctcccttgcaaagtccgaggtggttggctgaggccagttttgagccctccccattttctctccttagcggcagcttgtgtttcagaggacggtggaaatgtgctgccacctggtggccacatctgagcatagccccttagccagacctcaactactcaaaccacaagctgacacaggtagttgaaagacatattttgagagcctataatctggaagagtattagggatagctgaatcctctagcccttcctcataacacggcccattagtaaaattccctttaatacaatacaaatgttgaggcgacccctcccaaccataaatttattttcattgttacttcaaaactttaattttgctactgttataaatcatattgttactgttataaatcataaggtgtgtatcatatgtttatttatcatatgtatgtttttataaatcatagggtatgtatcatatgtatgttttccggtggccttaggtgacccctgtgaaggtgtcatctgtggttagcgacccacaggccgagaactgctgcgctagactttctcttgggcttagaggcctggctcacttgggcgtggttgaatcatggtagctaaggtttgggcacctagtcacaagcagttccctttccctgagcaggatttcctgtaacccaagttacaggaaccttggggttttgggtctttatccatccttttcatttttactgatactcactttagagaactcttcacgttcagagtcccaggccttgtaagttgaaagggtctcagcccagctctaagaagagcagtgagtttgggaagtcacctgaagtcttagggtcttaccggtactttgacagagagtggggaaggagcatataaaaaagggggcaaggagaagacaccctcaaagatgactctgagcactggctgtctctaaggccccactgttcgctggcacatagcgaggtctgtagaagcatgaggctttgagggaagtggtcatgacttcaagaggaagtgagtagacatgggtctatgcaagtatgcccacagcatcgtgtcagctctgagcagccaagcagcagtttccatctcccagctgcctaacatcctgtcttggctgtggcttgggtaattctgggttctggaaccccaaccttggtctcctgctaatacacttttctgtcaaagactggcagttgaggttatctaggcttttctgagaagatgcaaaagagcctatgtgtgtcctctctctggtcagccttttcaggatgctatgcagccaatagctgagctgtgctgtgctgctccaggctagagcttgggaggccttttcctggactcgggtcactttgtcagactggaaactcctcagagtccatccttgtctcccttgtagaaatcaggctctgccggtagaagtgaaattcatggtgcccctcctctcagatggaaaaaaaaatggcagggaaatccgagcttatcttcaattcactattaaaaactttcttaaatagacctttttttctcccccactctggtcctataaatggtcttctgtgagatccaaaatgtcaccagtggcctgcttatgtggccctttctctggtcctaccatctcttcctacctcagagcaggcactgaatctgcttcatacgtatgctttagtgtcacaatcttgttggcctaaacatcacattttacagtattaatttcttcctaatattgatcacatagtgacatcaaacagaggggctccttgtacttgtgacagtacaagtacatatcgtggttcatcatttctaagggctacctttcagaaacggggctctgaagccagccatatgggtttgaatgtcagtttgtcacttcctaactgtgctgtcatggccaatttatttaccctttggcgcctctgcttgcttatcattaacaagcattgtcactttctccagaagacattggatgagaccacaaataataaaatgttattttgttataaaactccaggacaccagagtgtcctggagagtacctaacaggtcctagttgagggtttctgtagctgtgtacccagtgccaggtttctgtcacctggcatgctaagaagcatctctagtcattcactgagcaatagtatactgctggccagccaggcaacatggtgtaaaaatgaaaagttctggttgggtctccaggaactgcaggcctatagagtctgggtaggaggctgttagggtggcatggtggatccacatgagggagaggtggtgtcttagttagggttttattgctgggaacagacactatgaccaaggcaagtcttataaaagacaacatttaatggggctggcttccaggttcagaggttcagtccattatcaaggtgggatcatggcagcatccaggcaggcatggtacaagagaagctgagagttctacatcttcatctgaaggtttctagcagaatattggcttccagggagtaaggatgagggtcttaaagcccacactcaccgtgacatacctactccaaaagggccacaccttctaatagtgccactccctgggccaagcatatccaaaccatcacaggtggtataggaagttttcttcaaggtcctgttagagaactgcctcgaggggagcctttttattttctaggtgggggcaaggaagagatcctgctagacctagtgagtgtgcacaggcgaagaagtgaaagggaatttcggagccaggaattgctgggagctgtgggcttatggcttcggtgaaagaagcagatggcaggagcctgaacaggctcaaaccccactaacctgggaatcataacgaaagctattatcaggaaccaggacctggtaacagaagatgtgagagactgggtccatgggtaccagtgaggtaacaggtgtgtgaggtggctgtctatcctggtctctctgccccctctcctggattgccttttggatttcaatccccagtgaacagatatttagcatggtcataagacaagctagtgagggaatatggaaacttctcttccacccctcaaactcgcccttgaacactggtgctctctgtttattcagaaaacaaaaaagaacggacatttctccttcgaagagaagaagcacccaaggcatcgcagaaacctctgggagtaacataatcctgggtgggaagccgtggtggttatggtcctctggaagagcatccactgctctttatagctgagccatcgctccagcctgtccaccttgcttttcaatgtaacaaaacatggaccgtcaccttgtttctgttgttgttaatgtagaagctgcccgtttcctgaccaacaagccttaaatagagaagaaagcttgatctcctgtcctgcctctctgtctgtggcaaatgatggagatttttctaggaaccaacaaagcgagattgcaattgctttttgttaaggaagactctttcttgcctcttggtagaaattgctttctgtaacttcccctctgaagaggacagaaagaaggcagttacagcagaagtaagaggaaaggccactcggggggctgatgaaacgtaaaacaacaaacaaacaaaaaacaaaaacaaaaacaaaacaaaataaaacaccccacgtaaacaccagggctggagagaagactcagtggataagtgtgcctgctgctcttgcactgtgtgtgtgtgtgtgtgtgtgtgtgtgtgtgtgtatgtgttgtgtgtgtgtgtgtgtgtgtgagtgtgtgtgtgtgtgtgtgagtgtgtgtgtgtgtgtgtgtgtgtgtgtgtgtgtgtgtgtgtgtgtgtaaaaattgttttcagttttgtccctgagtgtcctgaattttttaggtagatctgagtgcccttaaactcacaaagatctgcctgcctctgtctccccagtcctgggattaaagtgtgcatcacaattgtctctatcacaagatctttgtgttaagcaggctgagggtggaaatattacatgattagtgtttccacctcttctacccaatcctacccacagctcatctggtccctgaatgatctctagtttctccccaccacttgtgtgtgtgtgtgtgtgtgtgtgtgtgtgtgtgtgtgtgtgtgtgtgtgtgtgtgttgtatatcagttgtggtgggggcagtactcagagcctgatgccagccaatcattctacttctgaaatatatctttggctccccacatcctgacttttgagtgttggttctttctttttctttctttctttctttctttctttctttctttctttctttctttctttctttctttctttcattggtttggatttttgttttgttttgttttttgagacactgggttacttaggctggccttaacacagtaaccaaggcagggcttgaacctgtaatcccactgccttagccttcccctgtagctgaaactgtcagctgtcactaacagaccctgtctctaatctcctcttggagctgcctccatgtgactcaggccagcctcctgtgctctttccatccttttttttcttcttcttcttcagagggttcctgtacttcctcttggactatctcacttcttgaaacactctaaagaggagtgcttatcttgatggagctcgaaagttctctggggcccaggggacagcagaagccctgactctgtttgcctggggaagtaagaacggtggccctctcggatttggctgcagagacctgcatcctccaggttaatgggaaggcagggataagcggctgaggttgatggtcctgtaacaggccctttctgagaagagtctctaagagagagtcataccggaaggaatgagcaagttgtgagttctctggactgttgtgacattctaacttctgggcagaagtctgacaagagctgggtccactggcccatacacaacctgctgaagagccacggaagcttccgcctgaagcttttctgagacagcatggaagccgacaacaccacggagacggactggctgaacatcacctacatcaccatggaggctgccatcgggctctgtgccgttgtgggcaacatgctggtcatctgggtggtcaagctgaaccccactctgaggaccaccacgttctatttcattgtctccctagcactggctgacattgccgttggggtgctggtcacacctttggccattgctgtcagcctgcaagtcaagatgcacttctatgcctgccttttcatgtcctgtgtgctgctgatcttcacccatgcttccatcatgtccttgctggccattgctgtagaccgatacctgcgggtcaagctgacagtcaggtaacagggttgacgaaggggtggattagagagaaggctggagagtagagctaccaagtttggctcccagacccctttcgtagaaatgagtcaaactgacccttgaaatttacaaagggcagtgaatatctttgcaccacatggtttgtgaagacattagacatgaagagctgagacaggaataggaaacgagggtgctctgtgcccttctccattgaacatgggcatctgctttctggccagggtagccaaagatgatgaaaatgtgatgtatcttttagttaaaaaaagaatctgatctcaagttttcaaagtgacattgacctactagataggatatcttgttttaggagaaggggaagacaggcataagagataagtagatgggggtgtggctttgaagatgtagggtagatcttaacatggcttctgtcttagtctgttgaaaacggattcttaggatgcagtttgttctcttaatgaaatgtaaaacccccttgagacaaggatgttcttgtttgcaaaatggtagtatcattttctgtgcaaagaggacagtccaatgagaaactacattcccaggtttcttctggtttctcttgggggaagaatatagcatagaaactacagacaagctctggaggaaaacaagtctggattcctctccctgatcttttgatctgacactgggcacattctttctcggcttcactctccacctctcagagtggttctgaacatctgaaccaggctcacctccgttcaattgtagcactatcacttctggcttctgtgcagtacctgatgctgttttacctgatccataaaatgaagataataatttcacctttataaggttaaataaataaagctaataaatgtaaagttctcagaaaagccctgcctagagcctgtgtttagtaaatggtagctatgccactgccatcagtaaaatggagattgtcatgaaatatctctaaggctggagagatggctcagaggttaagagcactgactgctcttccgaaggtcctgaattcaaatcccagcaaccatatggtggctcacaactatcagtaatgagatctgatgccctcttctggggtgtctgaagacagctacagtgtacttacattaaaaaaaaaaaaaaagagaaggaagaaagaaagaaagaaagaaagaaagaaagaaaggaacaaacaaaggaagaaagaaaaaggaagaaagaaaaaggaaaagaaaaaggaaagagaaaaaaatatctctagttagctatgaggtttagttgagataagccttagttttgttcttttgtagtctgttttaggctatttaggaaggtttgtttaagcagaaatgatgatgggttctgaaacacttcaattaaacttaacaaaactctgattggttaactcaaacaccagaatagatgcccaggtagaaaggggacagggacagatagaagtgcagggctatctttcagcttgtgagctcctgtacaatagccaacagagacaatgcagagcacagcacaccagcaggcttcgaggagattctcatcagcctaggactcccaagactcagggtaactcttacaccacagcacagggaagggctggagaggtggctcagtaaataaaagtatctgttatttttgcagaggactcaggttccattcccagcacccagaaccgtcctgtccataactccagttccaggacatcccgtgttttcttctgaccttcctgggcaccaggcacacacatagtatacaaacatacatgcaaacaacacattcatatgcataaaataaaatacataagtctaaaaaaaataattattggagctaaggttgagtggaggcctataggaacctgattcctggaaacttatgactgataattctcagttgttgtgttcttaagcagatactccagaggagtttctggattttcctctgataatgctagtcttattttgtcttcatatctagagggatttagtcagagtgacattaggccatggctatttcacctcagcagattaggggattgggagagctgactttgtctttcttgttttctcccagggagtcatttcttgttgtgaactcaccatttttcccccattcaaacagatatagaacggttaccactcaaagaagaatatggctattcttgggcctttgctggctagtttcctttctggtggggctgacccccatgtttggctggaatagaaaagcaaccttagcgagctctcaaaatagcagcactcttttgtgccacttccgttccgtggtcagtttggattacatggtcttcttcagcttcgtcacctggatcctcgtccccctggttgtcatgtgtgtcatctacctagacatcttctacatcatccgaaataagctcagtcaaaacctgtctggcttcagagagacgcgtgcattttatggacgggagttcaagacagctaagtccctgtttctggttctcttcttgtttgcgctgtgctggctgcctttgtccatcatcaattttgtttcctattttgatgtaaagataccagatgtcgcaatgtgcctggggatcctgttgtcccacgcgaactccatgatgaaccctattgtctacgcctgcaaaataaaaaagttcaaagagacctactttctgatcctcagagctctcaggctctgtcagacctcagattctttggactcaaacatggaacagactactgagtaattaccttgacagatacagagccagctcgtctgccttcgcatgtggtatcagtaaacactataaggacttatcagacattcttgcttccttcactgcattgggatcatcgggctggttgccacagagttccactccttccccccaacgccccccccccactcctccctccttctgcttcagttattttcttgagcttctctaattcaattctgtggaagcctgacgtgaaggcaatgcatccctgattaccacggactctgcccttccttcccagacaaagaagtaatggaatgtggagggagtctcgtcttatcaaaggaaaactctagtggggctggacgtacagaacctgctccgaaggatccctggaatgtggggaacagaaggagcgaattgaatttaaaaagagggctaaatccacctgtgtgggtgcatttgagcaaataaaagatgatgcccaactgatgtgtagctctttgctaggattgcttgggggttgcaggcacagttgactgctcttggcattccttctgcttgcttctgggacacaatcacttctgttccaaggggcagcttcaccattgcagatggctgtcctctgggggtcgggggcaggatgtctgttatgcaaggttctgatgttcttgaaatcctaggcaacttcagcttcaggacaactggagatttgtttgttgttgtttgtttggagacagggtttctctgtgtagccctggctgtcctggaacttgctgtgtagaccaggctgacctcaaattcagagatctgcctgcctctgcctcctaagtactgggattaagggtaggcagcaccaccatctggctacagctggagatctttaggagtgctttgtaagtctggaacaggacatttgagaacactgacactaagacacacacatttgtggcttcagccaggatggaggaatgaaataagttaggtatcacaagattttatacagatactctgtatttgttacttttcagttgctattaaaaaaatatttcatgaccaagacaacttgtagaagaacgaatttatttgggtttctctttccagagggataagaggccatgatggtagggagtgggcatggcgtcaagaggcaggcatggcagccggacccagaagctgagtgatcacatcaccaccagaagcaggaagcagagagtgaacagaaagcagcgacaaggctttaacctctccaagtctaacctcactcagtgctgcatatccttccacacatccttctgcaaggctacatctgcccgcaatgcccaaaacagtgccaccaactgagggaccagcctgagggtggtggcatttctaatccaaaccaccacatagtccttgagtagctcacatgcccatatgcaggtaaatagattgcccaaaggatacagatggaaaatgaagacagggatgccaggcttttgctggctcctagttactctgtgaacccagatgaggagtcagtgctatttagtaaaagcgatctttgagtgcctgataaattctgttacgaaatataaggcaaatagtcaatattttttggggttgtgtgtgcacatgttcctgtgtgagaaggtgcacattagtgtgtggtggtggtggtggtggtggtggggggtgcgtgtgaattttgcatgtgaaggccagaagacaaattcagatatccctttcctaccaaggtgggtactgcccaccttgtttattttgaaacagattctcttttgtttttgtttttcgagacagggtttctctgtgtagctctggctgtcctggaactctcgtagaccaggctggctggcctcgaactcagaaatctgcctgcctctgcctctgaaacaaattctcttaactggccttgggctcaacacttagtctaagctggcaaggcccaggtatctggctatttccccagggctatggttgtgagtgtaggccatagctgggggggggggggtttgctatgggattagagactctccctaactctgtcaatccttttccaaccactgagattttaagtgccccttggctctgaaattctgtgaagtggctactacagttatttttatctcagtgtgaaggtgcagttgatcatggtggataaggcataatggtgtgagggtgaggcacctggtcatagtgtctctgtggtctggaaaacaaaagttgaccattgaccaagtatgacagacatacttttactcccaatattgggggggtaggatatggcggggggcagagaactctgtgaacccaaggccagccctgtctatgtagtgaatactaggccagccaggaatacacagtgagaccttggcaggaggagatgggagaaggaggaaaaaacaaaacaaaacaaaacaagattgatcatcgcgtcgtacttgaggctcagtcacttgactggagccctgcagccccacccttgcttttgcctctctgaatctgaagctacccacagagtctcactcccagagacaacgtattgatttgatgagaacctcaggacaatggttccaattaagcaaagagaagcgggaacctgaaagtggaattagctattcctgacgttcgtctaaagccttgtccttgtcctgagctcggtcacctaattcctcttgtcatcatttcagcagtggtcccttctttctcattcttcactccagaagaatcaagagctcggggcttccccttactgagtctctgatttagtttgagagcagctccaggaagaggccctgggcttgctccggggtgtcacaacctctgctcagttggctggacggtgagggggaagtgctgtagagtcttggtttcccggtactcttcacactgcacctcttgacttttaatttcaagctccattattgtgacatcgctcagtctcccctttgtgaggaggcttgattcaaagtaatcacttgactccagtgggaaggaccatcacggccgggcttgctggtatcgttagacccatgcctatgaggttctgagaaggactttgactttcttttttgttttctttgtccctctgactaccactggtggctcgctgggacctgggtggtttcattcttgccaagagagaataaagagctatgccagctcggaagaagccaaaacctggggcccagaagaagctgaagcctggcgtgtgaaaaatactcatttagcatagagtatttagcaaaggcaaaccaaaaatttctggctacaactgagtagctccactctggtttcaggtttagagatcagtgtgccaggggtcttcccatgaggcttgcctctggccagcaagttttcatcctaaaaggaaaactggggagttttctctaaagagaaaaggtacagagacacacagacaaatataggggtgggtttcctctctttcatatgaagacactgaacaaatgtacatgccaaatacatgggtttattactttgctttttaaaaatacaagtcaagtggaaatagagactagcctaccaagagtcagccaaaagctttttctcctcttccatttttattacatttgtgtgtgtgtgtgtgtgtgtgtgtgtgtgtgtgtgtgtgagagagagagagagagagagagagagagagagaatgagagagaggagacaacacaatggaaagaggttttcattgctactcacttaaactgctgtgtgcgctcctcatttgtaacatgggactaataacatccatgccatgtggacgtgtggctatgtggcagggcatgtgtgacagcacacgtggaggtcagaggacagttttgtggaggcggttctctccattttccatgtgggttctcagtaacctatgtacttttcctcccctgaatctaaagatcaatcatagccttaagagagagcgcggggaacagaatggacagctccagaatggacagctccagaatggacagctaacactgactgtaggatcttcatacccctgtcttcttatttgttttatttttttgatttttccaatttgagacagaatctcctgtcattcaggttgtccttgaacttgatatatatatagcaagcatgaccctggatctgtgacccaaacagaccaggaggagataataaatgcttactactgtctatgttactcagaaaataataattgatttcttaaaaaaatgcagtccttccttatctctgttgatactagatacaaaccagtcagtgttgtccacatactgtaattccagctccttggcgatggaagctggaggctcccaggttcggggccatccttgatctcgcatgagattgattgctgggtcagacatctgaaagcttgaccctaccaaagtgactcaggtgtcgggagccatttgtttgcttctgagtgaaaactcaggcagagtcaaggcaggtcagggtttcctggcagatttcccgactgctgagacttggaactataggagagaggtacacttgaagctcaaggcaaggggctgaaagttctattgaccttggtggaagaaacagggaggccccctggataagaagcaattgtttctgctagcttgtggtttggtttcccactgcactgtgggggataaagaggctgtgcaaaataaacttgggggctgctttggtattcactaacagccctcccaaatccatctcttgtctctgcatcttttttctacctttcctatagtcatcctcacttccccctcagagatggttgaaactcatgccagcgggctccgacactcaggcgtgagtgataaggtgatattggcaagtgtttcctcttcacatgaggctcagcattgcctgcttgagtcctcataaaatgatgaccaacttctgcgaggtagcagcacaaaagactggggtgggagtttgtactacctttgaaagacacacatcacactgccaaattttgcttatcatgcagactgtcttagttagggttttcattgctgtaaggagacaccatgaccaaggcaactcttataaaggataaccctttcctcaccccagttccttttggtcagtgttttgaccagagcaacagagaggctagctagaatagactgtgatgagaccattaacatacctaaaacaaacagctaagagcatcgactatccaggcactgtaatgaattcataggttgtcatttgctaatacacctcattcagccttatttaatctatagagtcttctttctagtcttgttcttgtctgcacattgtgtcaggggggcagggaggagagagagagaaatatatatatatatatatatatatatatatatataaaatgtgtatatatatatataaataaaatgtatatatatatatatagtcattgaggagtagataatataatgtaggtaaaaccctatcacaatgtaagctgtatacgctgaacttctatgaattagaggaaggtgccccctttctcaagaaaggctgctgttgcacaatgcagaaaagcaatctatatctggcccttggaggaaagtaccagctagctctagggtgtaagaaggagcatccagcttaaacttgagaatttaaggcggttcagaaatttacattgtcatagctagtggtcagaacatatgcatctatcaggaatcaggagaagctgcagctgctactgcacgaaaagatctacttggtgtgaagtcccagttttattcagaaaagctttctagcatctggaagctccagccctggatgctgacagcttcactcatggactctagcttgcagacatccatgcttctgacagccagatactctggccacactccccagggcttcactgcagtttggaactcaagttacttaaggatttctttgctgggatgccttccatctaaataggaactggagctctaaggatgatgggggtgggggaacaagaggcacagcctcttttaacacaaggcgaaagagggagggtacagttgctcacatgaacatatgccgatggtggtatgacttctgagtatctataaagtgtatatgtcaaagcgggtttaatcaaggagggggttggttggctctcttgctactttgagagctcagatttcgacagttgctgcaaagataacattttgttcatgagtgatagccctctgatgagttccccttgcagctgacacaacccagatggctctgcagagcaacattgcttagaataactggtggtttcttcctttacgtagggtgaaaccacttcagttcaatcatgtgttttcctcaagcagatccagggttcctgagatcctcgctctaatcattcctgccgaaggctcacttccttctcagcatggagttcctcctccttctctccttggctctcttttccggtaagatgttggtgaggaacacttctgcccactaagccacaaccttctgtggcagctagatcctcctctctacttagagccccagcttggtgtagcagtttggagcatatcaacagttggaagggagaataagaagtgaaaatatgtcatgttaacaggtcttattaagaggtcctaggttctttcttacctctgataagggagctgtggggaacttgaaaactttcactaaaattagggctttgcagggtttttttttatcagtatccccaatcctcccccctctctcctttcttccctcacgtgtttgcccagatatagacagacattcttatctcctttctgcctaagcctgacgccaaagacagtagtcagaaactggacttgccccaagcagttgtgctccctttagacttaactgcagatctctgtgggtcagcatccttgcctatgaactgaggatcacaagatcttctcgtctgattgtgatgagaagaaattgacacttaggctgtaaatttgatttgtaggaatgtgttacctcctgtaagacactggaagcagcctcttggtggtggtggggtagggttcctgcaacatacacttgggaagctgagagtgatgggttctgttgtcttctctcttgtcttttatcagatatttcccaagccatagtgaagctggacgttgcatgcattacttccccattacaaaatatcctgctatgataaagatgactacactgaagctggacagtggtagtgcatacctttaatcacagaactcaggaggccagcatggtctaaaaagcaagttccaggacagccaggattagatagatcctgttttgaaaacaaaaataaggcaggcgcacgcctttaatcctagcacttgggaggcagaggcaggcagatttctgagtttgaggccaccctggtctacagagtgagttccaggacagccagggctatacagagaaaacctgtctcaaaaaaccaaaccaaacaaaaaacaacaaaaagaaaacaaaaacaaaaacaaccaaacaactaaccaaccaaacaaacaaacaaaaaagatacctatactagtcttgtatggcaagttatcaggtcctaaactcatgaatccctttattttcagtttgctgcagctagaacaagcctcctaacctttcacttccttttagtggctgccaagataaggtaggaagctaggggcagagctaaggagtacagcaaaccccaagctcttcaaggatccttatgtccacattccacacattctcaggctagtgggaaagactttcccaagggtttctgggagctaagcacgtgaattagggctatctacattcatggaggtctgcctttttcctttagtcattttctctgtaaacacccacatagaaacatccagagatatgcttgattaatctaggcatctctaaatccaatcaaactgacatcaagattaactatcacaaatatctccaaataaaggtttcttcagcgatggcgtcattctgcagactgtttctggcttgcagatggctgtcatcttgtgacttcacatgattttacctcacaagaatttaaataaggaaatcagccatattggaataagaagtacgctagtgggggctggagagatggctcagcaggtagctcacactgtaacttcagttccaggagatgtccttttctgacatttggacgctgggcggagatacggtgtacttatatacatgcaggaaaagaacacttataaacataaaatataataaaatttttaaaaagtttgagagccacaccaaagatataattgtttcttaaaggccttgtttccaagtgcagtcataacacactctgtatagtgattagggtaccaacatatgaagaacacacacaacttaacccattatactgaccatttataagtgaacaaaatccaaatttcaattaacttattgtcttagtcagggtttctattcctgcacaaacatcatgaccaagaagcaaactggggaggaaagggtttattcagcttacacttccacactgctgctcatcactaaaggaagtcaggactggaactcaagcaggtcagaaagcaggagctgatgcagaggccacggagggatgttctttactggcttgcttcccctggcttgctcagcctcctctcttatagaaccaagactaccagcccagagatggtcccacccacaaggggaccccccaccttgatcactaattgagaaaatgcagctggatctcatggggcatttccccaactgaagctcctttctctgtgataactccagcctgtgtcaagttggcacacaaaaccagccagcacacttatcttctagggcccaggagagatttggtatgttttcaagaataatgaacactgtgtgtgtgtgtgtgtgtgtgtgtgtgtgtgtgtgtgtgtgtgtgtgtgtgtgtttatttgttcacagatgccatggtcatggatgaaaaggtgaaatcaggtgttgagctggagacagcttctgcagtctgtgtctatgatgcctactacaaggaccacaccaagtactggtgccgtggctacttcagggactcgtgcaacattattgccttcacccctaatagcaccaaccgtgtggccctgaaggatacaggaaaccaactcattatcactatatcctgcctggtcaaggaggacacaggctggtactggtgtggtatccagcgggacttggccagagatgacatggattttacacagctgattgtgactgacaatagagaagaccgggccaatggcttttcatctggtaaagagactggcaagggatctttgaagggtaatgggtgtttgttgaggtagtaaaggattcaggtctggtggtgtacacctttaatcccaatacttggaaggctgtagcaagtgaatctctgggtgttcaaggccagcatggtctacttaagtgagttccaagccatcaagagctataatatgaaaccttgtatcaaaacaaaactaaaataaaaaccacacaaaaaccaaaacaaacaacaaaaaactcattgaaggaagtggctactaactcaagctcctattgtattataccgattccactaagcaggatggagctggggtttaggtattattttgtaggaaagaagaatgtataagtgctaggtatgcttataagttccttttcctcacaacatcttgacttagaccttggaagaggctagatggtctcaaagacccgagatctttgcactaatggtcaaggctttgaggctctcttgaaagctcagccttgtaggtctagaaccttagagatggctcttttagaagtgagtgaggttgcaaaaagagactcaggtttcttatagctgtgcagcttaaagatttttaataattaatatgaattaaatattgcggtcaaatttgccagcacccacttttacgaaggtgaaatgtagttatcacttagaggctactgggagggactgggaccagagggccaagtcttggtaagccaaataactgtgacttttagctggagctaactcttgggatctcccaacgttcataggtgccttacttctctggcatctgtaagcccccatctctcaggcagagagctctggaagacacccgagctgttctctcattgttcctatttggagaagcaatgtgctttcctgtcactgtctggagcccagtggcagtaggaaaaacacaggggaaggactggtgagaagccgcataacccacccccctctccagttcctgtgctgggaagactcttactcacatttaatctaccagtaactgattcagcatgtgacccacggcgggaggtaacatccacgctggctttgtttccacttcgtgggtatctgctttaaatagcatttcttgaggtttaggctcaggaagagaggaatcttatcaaaacctgctcctttaaagagacacagaggaggctatgttggtctcccctatgaattgttagtagctatcaggagctatgtcaccggcttactcatttcctaaagatgggactgtctatttgatacgtcaaacttttttctcttgggaatgaatctagcctgggactctgagcacaaactgccatttagcctgcacaaggcctgtgtgcaaatctgggaaaagtttcccttcctctggttgcagaggactcagtagcagggtgcatatcaagtgcactgtgggttggatttcagcctctacttctcactccagccttgtcccctgtccatggcatgcttacgcaacagttaatgctgtcgatgttttacacaaaaaagccaagaatgcacttattctctggagagcaaaaggaagacaggtgggaatgcagctggaagcaaaggaaaggctctgaaataggctttgttatcaacaatttctttctgattcagacccttcaggcaataggacccggagctgtagggcttccaaagctgtccaaaaggcagagggctcccggtgagtcgcaatctgagatgattgggttggggcatggatggggtgaaccacaatataatgtagtgaccgggttacaactcttactttgtagctgtagtgtttctctgtctaaataatcttcattgtaatgatttggtttctttaaaaagactattttgtttgtttgtttgtttgtttgtttatttgtttgaaagcagcagaaaatagcctctagttagtttataaataggggacaccgtcctaaggaaagagagagctgtctgaagtgcagagatagggatgcaggccccaggacctcatcaggactttatcttcatctctagccccattttcatctgatgcttgcgtgtgcatttgcttcttatctttctgtgtcgctcttctctagctctattctgttctttaaaaagagtttgatttatttttattttacatgtatgtgtgtgtgtgtatgtgtacatacgtacgtacatttctgctggtgcccgtggagccaagaaaagggaatttgatcctctggaactggaagtaaagatagttatgagctgccatgtggatgctgagaactgaacccggtcctctgtaaaagtagcaagtgctcttaacttctgagacatctctctctctctctctctctctctctctctctctctttgttgttgttgttgttttttctttttgagacaggatctgaaaaagtttccttccattttcttatgttgctgaccgttgaccttaaacatttggtgcctctgcttcctcctcctgagaaatggaattactggtgtgtgctaccacacccagcacacaaacactctaccaactgaactatccccccagcctgtatttcttctctttctctttctctccccctccctcttcctttcccactttcctttctttttgccatagcaggtgacacctatgtatagttccccaatttacttctcccccattcataggaatggctgaagtctgtggttttccacttcttgtcccgatttaacctctggggaaggactcactggcccagcttggtcaaatgcccatcagatccaaagaacagggtcactcttccagaatgtagttgtcaggagctaccggggctgggctgggactggtgtgagaagaaaaccaaaaggtctccttccaagggacctgatatctgatgtggtttcttctagaatgtccattctgatcatttgtatactgattaccagtttggggatcatctttataatcagtcacttgtccagaggaaggcgaagccaaagaaatagagaaggtaaatagtctggggctgggggctggggggcatctagagttctgtggggcagtgggtgtgtgtgggggaataaagggggtgggagagaacccgcatcccactagagttctggtgctctgggcgggcagacacagaggactgcctctcgctctccacgcagccctgggtgggtgtctggctgtatgaagccatggaccccaggttcgcggggagtggacagggtacagtctaacgtctctaggccttacagaggccagagataacagtttctcagtctcggttattccagacgtcactggataccgtggaagagctgagaacaaagtggggcagctcggtcatccccggaccgaagagaggagagggcagggagggggggtgctggatggttcccacgcaggagagtctttagtttggtccggtccatggttggagtacaggaaggccttccggtgggagattagacatgactctttaggggaaagcctattccattgttcaaccaccgcaggccttgatgaacagagacagtctatagttttagagctttattgtagaaagagagaaagagagaaggtaaaaagagggagacagaggccgggcgtggtggcgcatgcctttaatacccgcacttgggaggcagaggcaggcagattactgagttcgaggccagtctggtctacagagtgagttccaggacagccagagctacacagagaaaccctgtctcaaaaaaacaaaaacaaaacaaaagaaaacaaacaaaaaaccaaagaaagaaagaaagaaagaaagaaagaaagagggagaccagtcatggccacatggagagaaaaggggaagggaaggagaaaagtagagctagagataagagtaagaaaagtgagagcttgagagagagagagaggaggggctaagcagccccatctatagtgggctgggctatcttgtagttgcagggtagctgtggggaggagcatacctggctatagtcaggtaactgtaggggtggagtctagccagaatgccaggaacttgggacattgtctgtgtgactctatagtcacaggattatggagttgggggtgtcaggcactgtctctgagaatgtgtctcacagttccatcccttgcagagttttctttctttctttttttttttttttttaagatttatttattacatgtaagtacactgtagctgtcttcagacacaccagaagagggcgtcagatctcgtttcagatggttgtgagccaccatgtggttgctgggatttgaactctggaccttaggaagagcagtcgggtgctcttacccactgagccatctcaccagcccccttgcagagttttctactgggtctccggagcaagcctcgttcaaccaaaacaggctgcctttcacggtcccacagagtttcacatgaatgaatgtgaccctcctctaattgcctagtcacatagataccaaggcagctagtcagcccactaggctgaggaggatgtataatgagaggtggtggaagaagcaaggtagtcttaagtggagtagatgcagacagcgaagaaggaagacagaaattaactgtatgtaggttccatatctgcagggctacctgcctcccagcacacaagctttggacagtagcctgatatccttactgcctgtctgaaagattgtattcacctgtagggatacagacaaggctttgtcaaatgatggagctactataaccaccaccaaccgagccagaatgtatggcttttgccaaggggtctgtgtgggacatgtgggcccaggatctcattccttagctttgtgtctctgttttctcttggatagttactggcaaaagcatcagtagaaacccacaagcaagccaaggcccgtctatggtctccataactttggtaagttccatccttatttcctgcatcctcagccccagcagaaccctgtcttttgctctaccctttgacagagagaggactgtgactgtatgtctttgtctgggacacaggcaagtcctaccatctggaaagttctctaggtcaccaccatgtggaaagttcaccatttggctaagctctggagcatttgcagaagtgaaagaataccacgagcacctctgtttagccaaggcagtgctgtttgcttttgtctctttatgatcagaacccaagcaaacaccttggacaatgaagaggctataggtataattaaaaaatggagtctagtcactctgggtttggaaacatagaaaaacatttcagaaaaataatgattgagataaaacaaacaaacaccttaaaacagaaacccaccatcatcaccaaatcccagtagcatcctaatgacgaaagatctattaatgacacacacaacgggccagtgcctggaggagccgagctgtgaaactaaggctacaaggtctcagtctgctcctgtgagatctaggtctcgtgcagacgtagagcaagctctataagaaggtaagggaaaggctcccacagtgaccttgcctttttgccatctagaagctttgggatcagtggaggtgagggtatgcagaaagcatgtctggttctatcccctgtaggatacaattgtagtttgtatttctttcagaaacttatcactgattctttaagatatgaccctgggcaacatttctcttttccaagctagtttttctctctacgttaaaaactgttcttatactcttctgagttttctatccatccatccactcatgacccaccagccccactcatgcacccttcattttgcaaactaggaacatgctagttgccgaggttacaaagacaaacaaaatagattagcatctgtcttcatggagtgtatgatgtaaaagaggaaaacagctgagtggctgtggtactcccagaagcccaggcagaagcatctcaagtctgaggccagcttggactacacagtgagttctaggcttgcttagactacagagtgagactctgtctcatacataagcaagaaggtgttgtggtggggtggaggagtacaagcaaccagacataagcacacatgtaagcttgtcagctagaataagcgaaggaggcgtgatgctataaatgataggccaatagaatccagtgctgttctctttagcaaggaaccagcaacctgttttagccatggcctgttccctcatccttgggcaaacttaggagcctgaaccaaagtcccttctagttttgttattcttggcccctgaagtccagatacatttataccatcaaaattcagtgagaggggagcaagccctaggtatcaatcaagctttcctacagctgcctgagaagtctcacagggatgacatcacactccagccctgaaaacaaacattggtggtttcagggccagtaagatggctcagtaggtagaggtgcctgccaccaatcctgttgacctgagtttaatcctcagtactcagatgtcagagagaacctagttgtccttatggtacacacactatagcactgtgtgtccacacacacacacacacacacacacacacacacacagagagagagagagagagagagagagaaagaaagaataaattaaaaaaaaaaaacaagccttgcgtattttgttcctgggaatcccggaacaccatttgtcatctagaagctttgggaatgcttatgtttgtttgaaaaaattcctgagtatgggaatgtaattttcaatttagaagagaggaaactaggcccagaaaagtgaagcttgtggctttttgctgacaaacactcagacaagagccttcaactcagttttccttttctgtttcccaacaaagtaggcaaggatttgaagttctttccacgtgtcctgactcaagggaatggcttgaactgaacatgtgtgactgaagatttctttcacttagctcctaaataaagtgatgtcattacagtagaatatatatgacgactggtctgtgtcttggagactgactctgacctttttaggatttctagtggactctgtgaccttgcagtggtcttttgtggcacacggcagcagtgagactcagaagagctttgatagagcacgccaagcaaggctgccattgtatgatctctcatgcattagattagctacagtgaagaagaggttacagaatctgggacaaagggaaatgacttatttatttcatttagcagccaataactatctgaatactgttgaaaatcccccccctcccccaggtatgactgacatctcctaggctgacattgatggaaaagtatttattgaaacgttcctaaaaagcataatattccagtgcatttctgaattggtatcaaatgttttatccaaaaatagaagatcgatagagtctgtggttctcatattgtcttagtgaaaagactctgcactccagagaacatccctaatggagataactgtcaccagagagagtgggtgctggttttgaccaatgagtaatcaaggggtgacaggtgacaagtgttttccaatcaggaagcacaaggcaagaatgaggcatcctctgtgggagcaagcagaattaccactattgcacgtgctcccctgcaagctggccatctccccatatggcacctgtcctgtttcgtcgctgcctttgttgccttcctaaggcccctgctaccctgtgggagaagtgcacatcatgtgtgtgctcggacacgtagaggctggaagataatctcacgtcttcaggagctgtccactttctatgagatatgggggtttctcattggcctggagcttgctgattaagctaggctagctgaacaacgagagccggggatgctcctgcctccacctctccagcgctatgattgcaatcatgtatgtgccactgggccccacatcttcccatgggtcctggagatcgaagtcaggttcttgttcctgcaaggagagcctttcactgatggaggcatttccttagtcccagaagcacacaatttgatatgcccaacctcagcctcagcctccagaatcctcgagtgccccccatgccctgtctgaacagggttggagtcagattgggtgttgatcagattcagtatgcgtcttgtcagattagatcagggctcttgaaatgtctttgatgagcatagttcaggttctgccccgactcctttctatagggagggaactccaaacccctcagcagtctgagggaaagggccagggtctagacgtcatacttgcatgcttccttgtagtctttcttcttctttgagtaagaaacaccccctcccacaaaagcgttctccctctgctcctgaccagtctcagtcttgtccagtggtcatgaattgaatttatacatagtcaacttaccagggagctaataattcttcagtgaggggtcagactgtaggctcatgtcatctctccatgcctgggcttgcacaggtcttaatgatgccacaatagctatggatttgtgtgtgtgtgtgtgtgtgtgtgtgtgtgtgtgtgtgtgtgtgtgcatgcttgtgtactaggttgtacatacacaccacagagtaaagttgtcagaggacaactttcaggagtcagttctctccttccaccgtgtgagtcacaggactaaactcaggttgtcaggtttggtagcaaatgtccttatctacttcaccagccctcaggcttattttataaatgttttcttcttgcttgatacttacatttcagagtaagattgcttaattaaaaagaatcttgctgattttttcatggggtagtctatatgattgtccatttgttttggggaataaaatgaacatgtttaatctctacttttggctctcaaccaagttgtcacacatatctctaatgccatacaaaggagatagaaacccacattttagtagtgttttataccatacagactttgtgttggcttagaattctggtcttgatttctggagaagatgaagggaccaaccttggaggagggtctgccattatttgaaaatcttcaactgttcattggcccctccctggttatcatcactgcgtttctttgtcttgagctctacccccaccctttggaaaggtttaggggcatcatcactcaaggggctgccaccttcagttggagtgacagcaccagccacctttcctctagtggtgaatgtcattaaccactggtccttatgactgatgacaattaagttagatcaagcctaaaccaccccaactacagctttacatagagtgtggtcccaggtttgtggaaaacaacaaaatcaaacatatgaataaatccagaaagcaacatgtcgaaggagctgagctgaggtctgcattctgcctcatgggagaggcagatctgagtctgtcactttaatctgggaatagatagtgggctccaagcctgaggagtggtttctagtcaagtcattgctgttttcttctgggggcttgaaagtcatgctggcatacgtgagtgactcctttgataaagacgacagcttttggggagaaagaggagaagcaagtgaagcaaaaggtgtctctttaaaagtgatccagaaactttgaaaagtgtggacccaaagagagcagaaaaactcacaaaagaactacttgcccagagtccagaaagtgatgccaatagtcccgtccacaatgcaggatagagaggagacagaataaaccaactccccctaaataatttggtgtaccaccttcaccacacgcaatctccctcttgcacccctaaaacaacacgtggtcttactttggtgggaggctctgagggagggtcctgggtctgggcactggagtgacctgcagcaaacaaggaggaagagagttgtcctttcactagggggtctggatgagtgggagcctctcactttaggtggttagtgggtaggggtactggtgtgtgaagagcagcaaggaggagcagggaagggcctctgaggtggctctgcaaagagagtgggccgagctccctccctcctcttccccagcactcacatcgctcttagtgacagtagaagagaccactcacattttctgcagctcttgacaatgaggaagataagggccacaatgagcagtgtcagcagaaccccagcaaaaaaggccaagatgatgtgttcctttctgttttagcagaaacaaaagggagtagatgacctgctagcagacaggccccttgaagcctttccggaaagccaggcttaactttcttttttttgttttgtttctttttttttggtttttttgagacagggtttccctgtatagccctggctgtcctggaactcactttgtagaccaggctggcctcgaactcagaaatccgcctgcctctgcctcccgagtgttgggattaaaggcgtgcgccaccacgcccggctcaggcttaactttcttatgtgggctcttacgtgggctggaggacttgctcccgcccactgctggagaagagacaattttgcttttggggtccgcagtcacaagactttctcccaatccctccctcaacactccacatcccagcattgtgtgaagtgtgtagtggggctctcttaaatcttgggcaacgttgagttcatactgcttgtaacccagcacttgggaagctgagactggaagattgtggcagtttagaggccagcctgggccacgttgtgagacatgctcagttcccctcccctgccctgccaacagaactatactcctaaggtcaaacactgagttcttccaccgttcctgacctcctctcccactcattttgcccttcccaaggccctgagacaaaatggtcaataaaaaccaatggactggaaatgccacaaggaccggataaatgtgttcctttacttggggttgaagaaatagggtgtagagctggtcactggggctgtcgtggagaatgtgcctgcagagaacatggaaggtatcagtttcagggggatcagtatctctgccctactcctgccatccctctaggataagaccccaagcactacccatgggagctttcaagttggctacagctctgcagaggggagaacaatgagtcttttttgccgatgaccccaggactttttgcatgccaggtgaagccctctaccactgagctacatgccaccatctgagtgagaactttaaaatgagaagtagagctgtccttgaaatggtttacaaagtaaaggggcagaggtatagtgggaagccctggggagatgtggttctgagtttagctggtacttccctagtttcttgtgaccgccagagtgtatgagtgtgtgtgtgtgtgtgtgtgtgtgtgtgtgtgtgtgtgtgtgtgtgtgttttctagtgtctaacccacagggagagaagcaagaagaaacatgaagtatattttcataaactaccagctgatctactcagtttggaggacaggtcaggtctttctgattccttttgcctcctccttggtgggcactggcttctgcagtgtagtgcacttgaattcttctagctcagccacactctggccagcactacttcccggggagctttgaacacaactcctccttttactaattcaccgtaagcacccagggaaatgatgtctgtcccgaactcacagattgtggatttaggtgtggaggaagtagatcccatgctgtcttctcctgagaataaaacaggtacgttttagcttggtctggaggctgggcgtggcaatgcgttcaatggcgggtggttcagaatgggttaatccctctatggagttgcagtgatgtctcattggtactttgttcacctggacatattcaaccaccagaacgtaggagcccttttaagtctagcatttaccctttgctttgagataatcagcagctgggtgtggtcacaagtgtctctaattccaagcacagggaggtaggaggaccaagagttcaaggtcaacctcaactaaatagtaaattccaagttagcctctgttacatgagacactatcacaaacaaacaaaaataaggggctggagagatttgatggttagcagcactcggtgcttttctagaggaccagggttcaggtgccagcacctacatggcgattcacagctatctaaagtccagttccagggtatctgacaccatcttctctctggcaccagtattaaatgcacatatattcaggcaggcaaacacccaggtacattaataaaaagtaagaaaaaaaaagaacaaaatcaagaaaactactagctattaggttacatagctagtctcttcccccactctctcactcacccaatgattcaatcaatcaaaaacataaagcaaaaatctagcaccttgggggccaccaacacagtacaagtgtatggctttggcacacctggtgactcctctgttgtaacccataaagacatatagtgcttctttaaagtatcgtctttgagatatgtgatggcttttcagacatgtatgcatgtcactgaacaggtagtactgaaatgaacgcaaagatgaggtggggagctggctcagtgcctcagagtacttgctgctcttctggaggacccaggtacgagtcccagctcctacacggcagctcacgaccacctgttaactcccattccaagggatcagacaccattctctggtctctctgggcaccagacaagcatgtggtgctcagattacacccaggcaaaccacaaaactgtaaagcatctcaagtcaggaaagtaccctcacctggactcctagtacacattgctagctgtagctagcattgtgtagctccatttagccccacacctgcgatttattcaagctgcctgcaatactgctcctcattcaaggccagacctcattcctgctcagcatgttatgctcattcttgcatacttctaaaacccttaagaacactcttagtggtgataggcttttctgagcagcggcctcctcaccacgtgtgtgggagatactcggtaagatgctgtgcagatgtcaaagaccaacgagagcctcagcccctgcgcagtacagattgtggtttttcttatacctgccacatctgggacgtttattttagaaagtatcacaaggtgagcttcaaaactaaaataaaatggtgtaatcccatcgatagaccatgataagagctcttcaacacatagggctgttcatttctggaagttctctatattttcaaataacagttggccaggaagaactgaaaccggcaagcagacccgtgagaaagcaaaccaccaggttcagactgaccacactgcctctctttcttctacttttcttaaaaagatttatttaaactaaccagtaccccggagctcgtgactctagctgaatatgtatcaaaagatggcctagtcggccatcactggaaagagaggcccattggacttgcaaactttatatgccccagtacaggggaacgccagggccaaaaagtgggagttggtgggagggtatgggggacttttgggatagcattggaaatgtaaatgaggaaaatgcctaataaaaaatataaaataaaaaaaggtgtatttacttatttaatgtgcaccagtgttttgtctgtatgcatgtctatgtgagggtattaggtcctctggaactggagttacagatggtttgagctgccatgtgggtgctgggaattgaacctgggtcctctggaagagcagccagtgctcctaagcactgagccatctctcgagccctgacactggactctcttaatcagttccatgcttatacaaatgttttccaatgtttttaataactaacagcgagacaggcacttttacatgtaaaatgtcagctacaaccctagttactttttggtggccacaactttaattcatatttaggcaaacccatcattaaaaaaacactggggttctacaaatcctctgagtccgaaggcaatttacttagaaaaatgccataagtggctcatatgctttaaccagtcagtttctataagtgaatatgcctatccttagatatgggggcaggggaagagaggttaagaaggattcctgtccccaagtgtcattaaagcaatagcaaggcagcattataccgtagctcaccattcagcattcttgtttcatcatttctgaaaaccaagactaggaacagaaaagtcaaacgctcagtactcacagctgcatcgtatgactggagtctttctggaaaggtaaagacccttctaatccagactaaataattgcccatcagaggacattttaattatctgtttagtgctggcttctgatgttctttgggtgggggaagggttacattggaacggctgtgtagcacaggcctcagtatggagtgtgagtctctcatgccagatcaaactgcaaagagcattgttcctggagcagcagtggagtacaggcatctggagcctagaggatgacgcgtgtgctacaaagggcatggctggagaagtgacccaagcccttggaggagcccagaagatcgtaagttggatcccagacattggacagttggagattgaattttgcttttgattttggctgtgccctgatattttccctcttgaaggaagaaactgttttagtggagcccacagttaaaagacttttaattgtaaaaagactttggattttaaaagagatggatattttaaagaaattgaaattttaagaatatgtaaaaactgtgggacttctaaagttatttagatcttaaaatgtagtttcccattgactttaatcacaggacatggtagtactaagagacgccctaagggatctcctacactcctacaatggaagtccaagggatctagcagttactcagtctcacgcagcaagcaggcaaaggagcaagagcaagagctagactcccttcttccaatgtccttatattgtnnnnnnnnnnnnnnnnnnnnggagggtatgggggacttttgggatagcattggaaatgtaaatgaggaaaatgcctaataaaaaatataaaataaaaaaaggtgtatttacttatttaatgtgcaccagtgttttgtctgtatgcatgtctatgtgagggtattaggtcctctggaactggagttacagatggtttgagctgccatgtgggtgctgggaattgaacctgggtcctctggaagagcagccagtgctcctaagcactgagccatctctcgagccctgacactggactctcttaatcagttccatgcttatacaaatgttttccaatgtttttaataactaacagcgagacaggcacttttacatgtaaaatgtcagctacaaccctagttactttttggtggccacaactttaattcatatttaggcaaacccatcattaaaaaaacactggggttctacaaatcctctgagtccgaaggcaatttacttagaaaaatgccataagtggctcatatgctttaaccagtcagtttctataagtgaatatgcctatccttagatatgggggcaggggaagagaggttaagaaggattcctgtccccaagtgtcattaaagcaatagcaaggcagcattataccgtagctcaccattcagcattcttgtatctgtcgctgtcagagcaaaagggaagtgctgacaagaaaatttggttggaagtctgaactgtgagaacaggaagaccatggtccacccagaatgagcaggggtaacactttttctatcaccttttggttccttttgaaattcatgttggccatgtgaggtggtacatgcttttaatcccagcacttgggaggcataggaagtgatgcctgtggatttgagatcagcttggtctacatagtgaattctaggacaggccagtcactatgaatagggagaaccggtctcaaaataaaataaaataagtcaatggtattcattggagaacaccataaaatattagcatattttgtattttattatagtatacatttatatgttctataaaatagaaagtattgaaatgtattcttcctgaggagtatgactttccactagaccttacatttagagctactgatacctctgcttttgcaggagtggttctatataaagaagcaactcaaagaaatattagcacataaaaaaatcctaggccaccctactgtaacagactaggtcatatgacaacaccacagagaaacagctacttacaaatctaggtgacaaaacccaacaaacatatttacctttaaaaacaacaatctagtcaggtgtgttggcactcactggagaggctgaggcaggagaattgccatgaggtcaaatctagcctggattacacagaatctgtccaaaaaattcaaagggagcctggcatggtgtgtttacatctctaatcccacaagttggcagaggcaggccgatctctttaaatttcaggagcgcctgagttccaggccagtcaggggtacatagtgagaccctgtctaaacagaacagaacagatcaaaaccaaccaaaatacgggcaagaggggtggctcagcaggtaaaggtacataccccacaactctggaaggctgagtttcctagatcccatgcaaaggtggaaggaaagaagtgacttgaaagttggttttgatatgtacacaacaccacacacacacacacacacacacactttttaatcccagaagagaataacaataatccaagcatttgtcagaagcagaaagttgagccaagaacaatgctctttgcagtttgatctggcatgagagactcacactccatacggtgaggcctgtgcaacacagccgttccaatgtaacccttcccccacccaaagaacaacatcagaagccagcactaaacagataattaaaatgtcctctgatgggcaattatttagtctggattagaagggtctttacctttccagaaagactccagtcatacgatgcagctgt

SEQ ID NO: 815 - DNA, 918 bp, Mus musculus
agctagacttcatcaagcacatgtggagagctctgtattaggttaatgtgctaacattaacactggtgagcaaagtatgatcctcgtgctcaaaacgctgagaatccagatccagggttcctgagatcctcgctctaatcattcctgccgaaggctcacttccttctcagcatggagttcctcctccttctctccttggctctcttttccgatgccatggtcatggatgaaaaggtgaaatcaggtgttgagctggagacagcttctgcagtctgtgtctatgatgcctactacaaggaccacaccaagtactggtgccgtggctacttcagggactcgtgcaacattattgccttcacccctaatagcaccaaccgtgtggccctgaaggatacaggaaaccaactcattatcactatatcctgcctggtcaaggaggacacaggctggtactggtgtggtatccagcgggacttggccagagatgacatggattttacacagctgattgtgactgacaatagagaagaccgggccaatggcttttcatctgacccttcaggcaataggacccggagctgtagggcttccaaagctgtccaaaaggcagagggctcccgaatgtccattctgatcatttgtatactgattaccagtttggggatcatctttataatcagtcacttgtccagaggaaggcgaagccaaagaaatagagaagttactggcaaaagcatcagtagaaacccacaagcaagccaaggcccgtctatggtctccataactttggcaaggatttgaagttctttccacgtgtcctgactcaagggaatggcttgaactgaacatgtgtgactgaagatttctttcacttagctcctaaataaagtgatgtcattacagtagaatatatatgac

SEQ ID NO: 816 - protein, 218 aa, Mus musculus
SFLPKAHFLLSMEFLLLLSLALFSDAMVMDEKVKSGVELETASAVCVYDAYYKDHTKYWCRGYFRDSCNIIAFTPNSTNRVKDTGNQLIITISCLVKEDTGWYWCGIQRDLARDDMDFTQLIVTDNREDRANGFSSDPSGNRTRSCRASKAVQKAEGSRMSILIICILITSLGIIFIISHLSRGRRSQRNREVTGKSISRNPQASQGPSMVSITLARI

SEQ ID NO: 817 - DNA, 23852 bp, Homo sapiens
tcatggagcctgaagggtgcctagttgacttactgacaaaaggctccagttgggctgaacatgtgtgtggtggtgactcatttccataccattgtggaattgagcagagaacctgctctcggaggatgcctaggagatgttgggaacagaagaaataaactgagtttaagggggacttaaactgctgaattcacctgtggatgtttttgagtaaataaaagctaatagctaactggagtgtagctctttgctggggtaacttggggcttaaagacccagctggctgtctttggcactaagcttgcttgctacttggagccatgtgttggcatactcaccttcttactcttagccccagaacaccctgatccttattcctgggttcatcagagcatttgtcagctttatgaaccattcatctattgtgagagaaagaatcctattcatttcccctggtgtttcattctcataggagtagtgggggtagggcaaaaagagacaatggatagctattatttgttgagcccttttcttttcttttgtttctttcttttttttcttttttttttttttgagacaaggtctcgttctgtcacctaggctggagtgtagtggctcgatcgcagatcattgcagcctcaacatccctggctcaagggatcctcccacctcagcctcccaagtgactgggaccaggtacatgccatcaagcccagctaatttgtttatttttattttttatatagacaaggtctctttatgttactcaggctggtcttgaactcctgggctcaagtgatcctcctgccttggccttgccaaagtgttgggattacaggtgtgaaccattgcacctggcctgttgagcactctatatacactaagtactttgcatgcattatctcctttgatcctgacaatctgtgaggtaggtaccactataatgatcatctccattttgcagaagaaaaaactgaggcacagggaagttaagtaacttgtccatagtttcatgattaacaaataatagagccagaatttaagcttaaccctgccttacaggagaactcaagcttcttgccacctattctcagacataaagaggaacttgtaacattaaagcccaaactttcaagctcatattatgtacaattaacagataggcacaaactacagctttgtacgcttgaggacttccagatttttgccttagctactattgctgatctctaattaatcaggatactagacaggatagagtgccagtcacatcttctgagcactgaatgtggctctagagattcaaggtgtcatctctggtttgatctatccaaatttgctgctgtgaactctcactttcaagaaaatattttagctagacaagagcaacaagatggagatttcaattaaacaacatcaaagtgggtaagcgtatctgaaaatgagattaattcttagccagtcctgaaggtttatcctgaacctacttttaggccagagcctgataaccaaatttatcttgttaacatttcatttcagcaaaggagctttgcttctcctcctgtcagcccaggaatcaagaattctaggtgtttcccctctaatttgtggtatttaaaaggcacttccaggatgaggccctaggtttattctagggctttgggtgtctcaggcacactgttcaccttggaacaacttttgccccattggagaaatgagaggaagggtcctgctgccctcagtctcctggtaatccccgcaccatgcttcttaatttacaaacagcttctaacgtagatacactacgttgtacactacgttgccatagaaacacttaacactgccctgttttttaaaacttgatttaaatggaccacttccctcaagacaaaacagcgttctgtcctgagtcatttggtatccttagcttctgagtttcagaactgcttttacttttttcttttcttccctcttcctcctcctcctttctgtctctctctctctctttttttcttttcctgattgccacagcttagcaagtccactgatggcttgctgggagttgtgttttttatctttgtctaacgggaatctcctgacttaaggtgttccataagcccaggagtccgtacagtgaaaataaatgtctttcgaagtaaactcaaaaaagatgaatgaagaatcactggtgaggagcttggttagaagggacaagatccactctggtttcaggtttagagattagtgttacaggagccgggtgcagtggctcatgcctgtaatcccagcactttgggaggccgaggtgggcggatcacgaggtcaggagatcgagaccatcctggctaaaacagtgaaaccccgtctctactaaaaatacaaaaaattagccgggcgtggtggcgggcagctgtagtcccagctactcgggaggctgaggcaggagaatggtgtgaacccgggaggcggagcttgcagtgagccgagatcgtgccactgcactccagcctgggcgacagaacgacactccgtctcaaaaacaaaaaagagagattagtgtcacaggaatctcctgggaacccctcttctggcttgctctctcagctaaatggtaaagaataactgcgggcttttattctaaaggaataagattaaaaaggccacccagacaaaactgaggtttgcttcctccctttcctccatatgaataagctggaactagggtggatgttgagcaactgggtttatttgccttattttaaaaatcaagacaactggggaaaaaagtagagacccatctaatgagaagaagcaaagactttttattctgagcttgctatagcaaggaggtcagctgtagtcacttgcattttggcagagactcaaaggtaggcagaagagtgggaaacatttatagtagcataaaaacacgaacttaagcacattaaaattttaatgagtttatttgagcattcaatgattcatgaattgggcagcaccagactacaagtggttcagtgctccaccaaaggaggtgagagaggaaactttcatgaggtatttgtgaaagtaagacaaagaaaatatattttattggttaaagtggaaaatccctagtttgaggttagtttggtggtttctgataggttaagcttaagttttgttttactgtttgcactgagttgggtttcagtttgctttatgtaggaatccaaggcaccagagccatcttcgactaatggccgtccgattaatttttttcatcagtgaaaaaagggaaaggctttaggtgtgccttgattggaggctgttggcttggggaagctgtaggcagggtaactagaagtggggcagcctatttgattaactgggggcacacatttggctttcttggttgatcctaagttgaaactggagacaaaaattaggagagttttcagttattaatcaagtcctggctattttttaatgtctctttttaaaaattttaattttttatgttttaaacttttattttaggttcagggatacctgtgcaggtttgccatataggtaacttcataggtttgttgtatagattatttcatcaccctggttctaagcctagtacccaacaattatttttttctgctcctctaccttctcccacactccatcctcaagtaagcccctgtgtctgttgtttccctctttttctccatgttttatcattatttagctctcacttataagggaggacatgcaatatttgtttttttgttactgcattagtttactaaggataatggcctccagctccatctatgttcctgcaaaggacatgatcttgttctttttcatggtcacatagtagtccatcgtgtatatgtaccactttttaaaaatccagtctgccattgatgggcatttaggttgattccatgtctttgctattgtgaacatacacatgtatgtgtcattatgatagaacaatttatatttctttgggtatatacccagtaatgggattgctgggttgaatgatagttctgtttttagctctttgaggaattgccatactgctttccacaaattagttatacatgaattgaactaattttatttagtaattggttcaattagtatactagttgaactaatttacactcccaccaacagcgtataagtgttctcttttctctgcagcttcactggtatctcttattttttgacgttctcataatagccattctgactggtgtgagatggtatctcattttgattttgatttgcatttctctaatgatcagtgatattgagcttttcttcacatgctgtttggccacatgtatgtcttcttttgaaaagtgttcatgtcctttgtctaccttttaatgggctgtttgtttttttcttgtaaatttgtttaagttccttatagatgctggatattagacctttgtcagatgaatagttcgcaaatacttttcccataatatcttttgctgtgcagagaagctcttcagtttaattggatcccatttgtcaatttttgcttttgttgtggtggcttttggccatttcatcatgaaatctttgccagttcctatgtccagaatggtattggctagtttgccttccagggtttttatagttttgagttttacatttaaatctttaatccatctgagttgatttttgtatatggtataaggaaggggtccagtttcaatcttctgcatatggctagccagttatcctagcaccatttattgaatagggagtcttttccccactgcttgttttgtcagttttgtcaaggatcagatggttgtaggtgtgtagctttacttctgggttctccattctattccattggtctatgtgtctgtttttgtaccagtaccatgctgttttggttactatagtcctgtagcatagtttgaagttgagtaatgtcatatcctccagcttggttctttttgcttaggattgccttagctatttgggctcttttttgattccatatcaatttcattggtagtttgataggaatcacattgaatctgtaaattgctttggtcaatatggccattttaatgatattgattcttcctatctatgagcatggaatgttcttctgtgttttgtaattctcattatagagatctttcacctccctggtaagctgtattcctaggtattttattcttttgtggcaattgtgaatgggattgcattcctgatttggctctcagcctggctgttcttggtttataggaatgctagtgatttttacacattgattttgttttctgaaactttgctaaagttgtttatcagctgaaggagcttttgggctgagactatggggttttcttgatatagcatcatgtcatccagaaacatggatagtttgacttctcttcctatttagatgccctttatttatgtctcttgcctgactgctttgagtcctggccattttgggttgattgttaaaggggccattgtttggctttctggcttaagatagcaatccgacttcctataagtctgacttacagcaggctggcttactatttattgattagcagttggtttcctgagcaggttgctgcaggttgcaggtcaggattctattttcatgtatggtgtggccatagtccacttgtatattcagtttcttttaaccaaatgcacattttctagagaaactctgctcttagctactatagctgagtatgatgggaataagaacacttgggctgcatcttgctccaactactcagatgacagatatctttaaagaccctttgtaaattctaatatgctctacagttttacagtattataactattgggaaagcagcacaatgtttgttttcctcccagatttaccatcaaatcatagtggctctactagctgtgtgaatgtgggcaagcgacttaagcttctgagcctcaattttcttcatttgtaagatcagattaataatacctgtgttgaagttgtttttgttttttgatttttactttttcttatggaaaacttcatacatacaaaagtagagtgactatgtcttagtctgtgttgctataagagaatacctgagggcaggtaatttatgaagaaaagaggtttatttggctcacaattctacaggctgtataagaagcatggtgctgggacctgtttggcttctggtgtgggcctcatgctgcttccacccatggtggaaggcaaagaggagccagtgggcagagatcacatgatgaacgcaagggaagcagggtggggggaggtgccagactctctgaaacaatcagctctcatgggaactaatagattgagaactcactcattaccatgatgacaatgatggcaccaagacattcatgagggatccacccccatgacctaaacacttcccacgagaccccacctccaacataggggatcaaatttcagcatgaggtttggagggtcaaatatgcaaactatagcagactagaagaacgaccccttatttatctattatcctgtttggtagttatcaaattatggccaatcttatttcatttgtgcctgtatccacttaccctgcctgactatcttgaaattttagatattaagttatttcatctacaaacttttcattttctatttctaaaagatgttttaaaaattatttggcttattcttattgcctatttaccttcctatttatacatctaaatagaatgaaagttaattctatggaattaatacaccaagtaatattcagaatactagtagacacatcattcattctctgtagctctggcactttcatttactttagagatactttttttttttttttttttgagacagcatctcactctgttgccccggctaaagtacagtggcgtgatctcggcttactgcaacctccgcctcccgggttcaagcgattctcctgcctcagcctcctgagtagctgggactacaggcacgcaccaccacgcctggctaatttttgtatttatagtagagatggggtttcaccatattggccaggctggtctcgaactcctgacctcgtcatccgcccacctcagcctcccaaagtgctgggattacaggcgtgagccaccgcgcctggctagagacactttttcatgtcttgggcattttgctgatatctgtgcacaatccatttctctttttgctgctttctttggtttcatgttgccatctctgagcaatgctgagtgtgtttgttttgcatgaagtattgtcagagataaggactgcctcttaaaaatataacaacaatatttgcattaattattcattgctgtgcaacaaattacacccgaaacttagaggcttgaaatagcaatcctttatcatctcttatggtttctaaggggcagaaattcagggggcattttggttgggtggttaatgcatggtgtctcatgagggtgctaggtctgcagttctctgaaggcttgacagtggctggaggatccacttctgagatgactgtcacatgtctggtgaattggtttttccatatgggcccctctgtagcctactcaagagcttggtggctgactttcccaagagggagcagcatgagagactagggtggaagttgcacgccttttatgacctagcctctgaaatcacatgccatcacttctgccatattttattgatcacacaggccagtcctgattcagtgtgggaggggactacataagggcatgaattccaggagccatcgtgaaggttggctatggcaatgccattatcacatctcaaaaaataaattgaataattatatcctaatagtatcactgtccatatattctaaattgtttgcttcaatcaggatccaaataagttccacatattataatttgtcatatgtctcttaagtcccttttgattcatagattctcctttccttgcttccttttttattcatgtaatttgtttgtgaaactcatagaggtttttgatgaggagcaactgaggtgatgtagataaaaacctaccatcatgaaggcttgctgcttgcccacatgctgacttcacatgaattagagacaggctccccttcctccagagaggacattattgcataacctggacaatctatgtatgacccttgatgggatgtgctggctctgggatgtgataagtagcacccagcttaacttcacctgagaggtgattcaataattccaacttttaaagccagtggtcagagcacatgagtcccattagaatcaggagaagctgctgctgcatagatgaatctccttgctttgtcccagctcttctcaggaaagctttcaggaagtctgaagaccgcagcccaaactgcggccacccacacttccacctgctcacgtgttccaggtcccaggcacgcaggctactgacagctggcatgcgccacccgtggccgtactccccagatgagcctgcagtgtccacttgggagctgggttagttagaaatctgattactaggattcctctcaactgtataagaaattgggcctccaagattggtagacagacaaaaggagtggcctctgatgatgccaggaccattggcagcaggacagggcatagtagagcacatacaaatgtgtaccagtgatggctgtgtgcatgtgcttttctgagtgtgggccagagcccatttacgcaggagggagatctctactgcccagaattttcttggttgccccgtcagtaagtttatgtctatgaagagcatgcggtgtggtgcattgtgcagtgtatctatacatggcagcactgcttggactaactggttgttttcccttttcactggtctcttcaaaccaggataaagccatattaagctcaagcatatctgtttcccttaaacagattcagaattcctgggctccctgggtgcattctatcattccagttgaaagtttgcttccttccagtcatgtggctcttcattctactctccttggctctcatttcaggtaggatgggggacggaacagctccagccctttaagctgtggcctttccagagactttgcactgaagtcctcacctacttggagtccttgcttattaactcgaaccatctaaggagtgggatgggaaaataaaaggcgatgaaaataggtcttgtccatattagttcttgttcttagctcagataagagagtttgtgaggaaattgaaaagcttgactaaaatgatgactctgcactcactttggcagcacatatactgaaattagaatgatacagagtagattagcatggcccttgtgcaaggatgacatgcaaattcattacgcattccatatttttccccagcatctccactggaataaaataaaacgagagctctgtattttcttttagtttacccaggttcccccttcccccttctcccctcaaaaatatatgtgcacatatatgaggacacgactttcccctttccacttgtgcttgaccccaaagatgagacttggaacactggccttttcccagctctgtctgaccttcagttgtgtggcatttagagttgctgaacctttctctgggtcagcattcatacttataaactgaagatcatgctatcttccttgtggggttgttacgaaaacaaaatgttataaagaacctgagcctgcattttagtggtttttgctatacttctggaaggctgagagaagaatgggctctgctgtctcatctcctcttcttggtcagacactttccctgccatggtcaagctggacatggtgtgcgtgacttcctcattgtgcaatatcctgagatgatagaggtgcctatgctggtcttgtacggagggaacatgaagttcttatcccctaaagacagaacatgacttcctctgttttcagccctgtgcagccagcagaagcctccaaacattactttctttctgagggtgctaaggtagggtgggagctagggacagagggcctcctaacggtaagcctcaggctcttcaaggccctccgtcaagcaatggtaggaggcctccatatttcacccacccttaggccagggaaaaggacttctccagagttgctttattagtttgctagggctgtgataacaacaacagcaacaaaaccacagtctgggaggctaaaacaatggaaatttatttccttatgttatgaaggtggtaagttcaagatcgaggcatttggcaagtttggtttcattctgaggccatctctcggtttgcagatgattgccttctggctgtgtcctcatgggccattcctctgtttgtattgtcagtgtcttaatctctcctttttataaggacatcagctgaattgaattaaggactaccccaatgaccctatgttaacttaattatctctttaaaggccttatatccaaatacagtcacattctggggtcactggaggttaggactgaaacatatgagttttgaaggggacatagttcagcccataatagttgccaatcaaaaagaggcaaaaatcagcctccgattctttaattaattatccttcaggagggcaggagctgcaatgttttgagagaacaatggtgtgtgtgtgtgcacgtgtgcgtgtgtgtgtgtgttttcacagatgccatggtcatggatgaaaaggtcaagagaagctttgtgctggacacggcttctgccatctgcaactacaatgcccactacaagaatcaccccaaatactggtgccgaggctatttccgtgactactgcaacatcatcgccttctcccctaacagcaccaatcatgtggccctgagggacacagggaaccagctcattgtcactatgtcctgcctgaccaaagaggacacgggctggtactggtgtggcatccagcgggactttgccagggatgacatggattttacagagctgattgtaactgacgacaaaggaaccctggccaatgacttttggtctgggaaaggtaaggagcctgcctggggtctggctggatgtaacccacagccatgggtgtttgctgctaagagagcactctctgaagccagtgagccccaactcagactcccactgggtactttgggcctgcctggcctctctcttcctccggcaaacatagggtggtcattaacagtgctggggaatagctggaagttggggacaaggagggtgtctgcgccctggggcacttttagaacttctcttcccttacagcaatctggtttaaggaccttagaagaggctgacagggtctaatagatgtgagatctttatgttgaaaggctttgaagttgttattaaatgtctgtgtgagaatcgcttgaaccaggcggcagaggttgcagtgagccgagattgcgccactgcactcctgcctgggcgatagagtgagactcagtctcaaaaaaaaaaaaagtctgtgtgccttgtcggtctagaatcttgaagattagattcttgagaggtgtctgaggctgcaaaaaatgacccacgtgcctggtaactgtcaacttaaataatttaatagtatacggaggtagccaggtgcggtggctcactcctgtaatcccagcactttgggaggctgaggtgggtggattgctagagcccaggagtttaagaccagcctgggcaacatggagaaagcccatccctacaaaaaatacaaaaattagctggatgtggtggtgcctgcctgtagtcccagctactcaggaggctgagaagggaggatcatctgagtccagggaggttgaggctgcagtgagccgtgattgcaccactgcacttcagcctggatgacagaatgagaccctgtctcaaaaaataataataataatttacagatataaatttcatggtccaactagtaagcaccctattttgcttttaaggaatgtgcagtttatatttggagaccacagggaaggtgtgggtggaactggaacccatagcagaaaagtcgagttaacaaattacaactcttggctggagctaagacataggatttccagatgttcactcaggttccttctgttgaatgatgaaaatctccttttgcaccagaaaacctctgtctctcagacagaggacttatggaaggcgctagcctttctttcttcctttttttttttctctttcccctgtgccttcttgttgtttccatttctagaaaggatgttcttttctatcacagtccagagcacaatgctggtaggaaaacaaaccagaagggcttaaggggtgcccttggaaacctgtccccatgctagaaagagagttttgctaacacttgactagctagtgattgattcagcaagcatcctacggaatgtaacatcgttcacacccacagtgtttctactttgtgttgttctgcttttacttaactgtgcaacttgacctgaatcttaggctcagacaagagaacgttcccacctgaacgtactccttagtttaaatgaaacacagacctctcccacgtcttatcagagggggtatcgtaggtggtcgtggtgccactgctcccgttgggttttggtggctgtcataagaaaaacatggcaattacatcaccaaatgagcagttctttaaggataggattggccctcttgtgcctctggcatcccctcctatggggaggagacctcagtttaggactgtaactatgggccacttctagtctacgtggggcctttgttcaaatctggaaaaggggccccttccttcaggtgcatggagtccagtggtagggtgcatggcctggcaagcagagtgtgggctaaatgtcggcccctgcttgtcccctcagccttgttccctgtgcagggcacatttatacaactgcgcgtggtacctctgctttactctggagtcaaccaggggactcactctctggacatagaatgacaggcagagctgcagctgggaggcagaggcaggacctggctatgggcctcacctgacttaacaaatcctttctgattcagacctatcaggcaacaaaaccagaagctgcaaggctcccaaagttgtccgcaaggctgaccgctccaggtgagtcatagtctcggcggatgaatgggcttggggcggtggggtggaggtaggggctggggtggcagcagtatgatatgacagttgatttgcaccgacaacttttctactgcacattatttctccaccttaactatgtatccttaatctgagtatttggtttcctcaaaaaaaaaaaaaaaatacagtttaggactcttggttgcaagcagcaaaaaagccctctagctattttaattaaaaggggacatttatcataaggagagagaggtgtttcaaatgcaggagcagggatgtggccacccttggaaattgtcaggaacatcatcacgaatttacctcagtctctaatctgcttcgaatctgtgtgtttccttccttctgtctctgtattgcccttgtatatttctcttttttcccctaatagtcatccatttatggttcctaagtttatttctcccccattcaagagactggccagtctgagactggattctcctattcccaatccacagttaatttctgaggaaggggttcattggcccagcttagtcagatgctcagcaggtcccatcgagggtggtccaaaggacagggtcactctaaaggaatacggttcccagaagctactgtaactgggttggggggtgggcaggggtgcaaatcccagaaaaagggatccagagctgagaatcaataggcagtttcttccaagcaacatgaaatctgctgtggttccttctaggacgtccattctcatcatttgcatactgatcacgggtttgggaatcatctctgtaatcagtcatttgaccaaaaggaggagaagtcaaaggaatagaaggggtaagtagctattgttgagggagggggtgggcaagaattagagaaaatgaaagaggtcaaggagcagatttcaaatgagtgaatgagagcctcttcatattgcctggtcacctggagaccaatgcagccagccatgggctggggtagatatctgcttgatggtgacaaggcatcacgagaagtgacagagggagcactggagctttcttaagtggatacatgtgtaggtcaggaaggaaggaggtcctgagacaaccacaccaggttcccatctgcagagccacctacctccccagcacacaaacttcgggctcctgtcgaaggaatgagcttctgggaccgctgggtaagcaggtatagaagagtctcctttttcatatacacaggatgttgccctgttgcccaggcttgagtgccgaagtatgatcatagctcactgcagcctcatgctcctggcctcaagccatcctctcacctcagcctctcaagtagctgggcccacaggcgcctgccaccatgcctggccaattttaattgtttattttttttaagacattgtcaagctctgttgcccaggctggagtgcagttgctcgatctcagctcactgcaacctccacctcccaggttcaagcgattctcctgcctcaagcctgatctttaggtctccccatccctaaatagagaagggactgtgtgcccacctttccctttagggcagcatcagagacatgactggtcagtaagacaaggctggtcttactgttcagagaatcctccagcatgtggcaaatatgccaacctctgaagtgtacacagagcagaaagaacattgcacagttgccactgtttggctaatagtagttttgcatttttctttttatgctcagaaatcacaggaacaccttaggcaatgaagagtctgtaggcataattaaaaacagactgcaacctcccttgggtatggaaatgtagaagaacaatatttcagaaaaagacagaaaaacactcctagtaacccttgctagtgatacaccaggatccatagccagaagaatctgaaatgcaaagcaaaggcttcaaggcctcatactttccctgggatattttgttcctgtggtcagaataggagccctaaaaaaagcaaagtagtggctcccacagcattcttgaccttttgtcctctagcagccttgggaactgtgaaggtggggcatgtggacaagacaatggctttctcaggtctgcccaagaccagcccttctggacacaattgtagtctaggtttttgctaaaaccattgtcacttttttaaggtgtgaccttgggcaactttatacttttctgggcctgtttccttttctataaattgagggtctcattttcatactccccaatatttttattcgttagttcaacaaaaaaggaccatgctagctagatgctggggatacaaagatgggcaaaagaaatgccatctgtgtccatggaacttgtagagggggaggaagacaaactatcacacatcacacatcaacacccaaatgtaacattgccaccaggagtcagtgctcttaaggaaaggcacatgatactatgaaagatgaggcagtagaactcaacgctacttctttttagcaagaagttgtacagcctgttgtagccatggcctgcttcctcaaactcgggcagatgaaatgtggcagcctgaaccaaggctcctagctttgacattcttgggctctgaagaagttcagctgtgttcacagaggtgaatgcaagccctgtgtaccaagccttcttattgactttcctactgatgggctttgcagtaatgatatctgatctcagccctgaaaataaacttgtgtttagtccccatgaaagccccatgacagagtttggaacttttgctgcagaaacactcttcaggggtaggcaatagatctcaactccattttccctttctattccccaacaaagtaggcaacactttgaagcccttctcgcgtgtcctgactccaaaggaaatggctcctactgaacagatgtgactgaagatttttttaatttagttcataaagtgatgctacaacagaataatcaccatgacaactggcccacacctcagagactgattctgatctcccaggaattctgaaggaccctctatccttgacaacaatcatttgcagccaggtagcaacggcggtagtcagaggagctatgatagaccacacccaagcaaggctgccctcaaataacatctcaagatcttagttcttatgcattccatcagtcagaagtgaagaagaggtggagaatctggattggggaccaggaaatcacttgtattttgttagccaataaattcctagccagtgttgaatgaactccaaggtatgagtaacttcttctagggtatcactgtaaaaatatttctggaaaagtttctttcaaagaataacgttctaactcatttctgaattggtatcaaatgctgcccaacccaaagaaagggagatagactaaatcagtggttctcagattcttttggtgaaaaggccattcctctcatccttaatgggaaacttccacctgactaaagggatgctgcttttgatcaatgagaaaccaaggtgtgataacttaagtgaaatattcattcaaatcaggaaatacaaatcaagaacaagacatcacagccatgggtgtgaatgaggttatattgccattcatgccagaattaccaacactcttagctcccacctgcatatctacaccctctctccccatatagggtctctcctgctatttctgggaattctcagggcctcccactcactgtctgtgctgccgtcatcacaagcctgcttttcattgtgttacgatctcttctaatgggtgtgctggccagcctcagtcctcaggatactcaagtggccttctggtctgagcagagttggaacagggaggttgtttgttgaaataattctgcacatgtcctgtgtgtttagatccagactcccacaaaatcgttcatgaacacacttccttcagcttccaccctaagtcctaattccccaaaggtagggaattcaaagctactcaacggcctgatgggaagggatgagggtgtggacaccacacctctgtgtttctgtacaacccacctccttgccagaggctcagatcaaacaacatcaaaagtgctctcttttcccttagccacaaaacagccccaattcctcccctgtggccctgtattgaatttaaacaaatgggatcattaacccaccagttctgcaaatagcaatacagtttgggttcagttaggacattccattctacaaggcgagatagcagacatagaccttccgcggcagatgaagacatctacagatgtcttggaagatttacattcacgatgtctggagaaccatttccctgtaggtttgttctgattccatgatccaggattcaagagctttgttctgctcttacctagcaaagatctttgaatttggggtcaatcatttaattactcattttatcctccagcaaggctggctgcataatgtgaagacaaaaaacaagacgctgtttagggctataccattaaaaaaaaaaatgggcagcttcaagaaaacaggaaagagcaattaatttgatatttcttgtacaagtagatagccaagtgacagtgctagccaagtgacagtgcttactctactcttgtagcgatgtttataaggtgctggccctgaactggaaagctgatatggcctctagcttcagggatggcagaattgtttgatgtcagccccaagtttgggaacagctgaaagctcaagaggcctccctgtgtgcacttcctacagtcagcgaacgggagaaggccattcctgggtctctgctgccctcgtggggtggctgccctggtggtgctgtggccacctcactgaattatctcccttaaacctgtttttcttctagacctgttcactcccacagagagactaattttttttttttttttttttttttttttttactcaaactgtcttccactggcttctccctcaaaatccaacttccaggagcagttgctctctctcagaaagaacatgctgtctggatcacgtcacctgactctttgcctttctcgtctccttgacaccataagtgctgtggggcggcttgatgtggaggccagatgcaaggaatttgaagtcagaggacttgatttaaatttttgttctgccatttatttttagccagatgtcattgagtaaattatttcatctccttggacttcaattttcttaacttgattttgcaaataataataagaattattattattaagacagagtctcattctgccacccaggctggagtacagtggtgtaatcttggctcactgcaggctcaacctcctgggctcaagtaatcctcccacctcaccctcccaagtagctgggaccacaggcatgcaccaccatgcctggctagttattttattttttgtaaaggtgggatctccctatgttgcccagactggtctcaaattttggggctcaagcaatctttctgccttggcctcccaaaggactggaattacaggcaagagacactacacccagaccccaaaatattatttaatgtatttttgaaagatctgtggtggatgcttctctcccactcctgcttcctttggtgtagactgagctccattaaggcaacactcctcagtgaccccccaccatgggaggtagagggggctatctgacatggcagactgggaataggaactgggcatacatactttctttcttcctcttcctcttttactcttttgggtgcagatttgaaagagcacatgagctcttctgcaactccttaggggaaggttgaacaactgcattgcttgttgggacgggtgggcttgctctggtgcagcttataactcagtagtggagttcagtattctgaacttctttgcagctgtagtataagctctattctccaatgttgaccatgttcataataaagatgatattttggtttctgtctgctcagtcctcttatttatatctatatgtttagggatcctcagtcccacaggtagcaatttcccctccccagaggccatcaccaagaccattcattgtgttttcttccagaggtatactaaatatatagatacacatatactctactacatgtgagtagagcatattcataattctgttcaacagcttgcaatatatcatagatatctgtttttattagaacatatagagctgcctcattctttttaatggctacattgcactcaatgaaccagtctcctctccatgtacaatgaagattttctcgatcttttgctgtttcagagaattgagcataatgtataaacatgcaaactctggagccagcctacccagggttgagttccggtgccactactactagcaatgtgaacttgggcaagttacttaacctctctgtgcctccatttctgtatctaaaatgagtaataattgtacctcacagtgttctgtgaggattccacgaatacatgccacgcacttagaatcgtactaaaagtgtaataagcctcagtaagttctagccaatttgattactgctgcagttcaagttacgtaggcaattttccatgtatttgagtaggataaatccttagaaataggattatttataaattcttagaaaagaatttagaatgttgttggctattgccaaatggtcttctgtggtagctgtaccaacgtgctctcccaccagtagtgtatgtgtgtcttggttccccccaagtcttgcccacacaggtagcaaactttttgaattttgccagtcttactgatagaaaaaattatgtaattttagttgtaatcattatttcccttattatgagtgaagtcgagtatcttttcatatatttgagccatttatatattctttcctacaaattgcccacccctatcccttgtcctttctattgagttgttcattttttcccctgttgatttacaaatgatctttatatatctataagatgctttgcaagtgttttctaagcttgtcatttgccttttgactttttaatggtactttggacttttaattgtactttagaagtcaagttaatcttttctggtttctgggatttgtgacatacattcaaaggcatgctctacaaaaatatttttaaaaattctcccatattttcttctagtgcttttatgattttttttactgttaaatttttcacatctgggatttattttcatataagaagtgaaatatggatcctactttattttcatttacatggttatctagttatcttgctaccacttattgaataaaccaatttctcccaaatgatttcatatgccatcttcatcatactctaaatttccttatatattttgatgtatttctggtctttaaattctattcaattgatttatttattcaggtaccattaacatattgctttaattagtgatgcttaataaaacaagtacttttagttagctactagggctagccttcccatataactttaattatttatttttatacatttttctggatttgctgtcttgtttatggtttacataggaaatttagagtaagcctgcccggtgaaaaataatcttattgatattttgttgttgttcacctttgggaactcatctgatgatatttttaatgggatttttatatgtgattattcattgggattttgggggaattaatgtttaatctttatctttggttctcatataatgttgttatgcatacctcttatgctataggatggaggtagaaatctccatttgcatagtgctttatacagtagggaccttgtgtttgtgtagagctcttggatgtatagaatgtttatgtataagatatttcatttaatcttcacactaaatattagtggtaagtgttatctctgttttcaagatgaaagacttcaggcttgaaaagtttaacaagtttgcctaaatgaatgctgctagttagtggcagagtttggtacctgcaccccaatcaaatctgagcttgtttccaagtgccatcacctttggtggtgtttttggctgtgaatgagctctggacttttaatcttgacctctggagaaggtggcaggaacagacaaacaaataataaagatggaggcagcactgtggggggtttgactttatttgaaatttttggtagattgttcatttggttgactcctcccaagttgattcatgatgctgggtgaatactctgtgcactgagctctgtaccacacactttggaagggtccaaggaaggcagtctatgcccccaaggggctcacaggctgtcagttcaagtgggagggccatcaatctttcctctggccaggaaaagactgaccattggtctccaaagatgctggatagcattgccagatcacatctaaacaactccgactgcagtttcacacaggtggtggtccaaaatttgtaaaaaagtgaaagtgatgtgtgaagatagggctgagatgagaggaaatggattcaagcctcattggaaaagctgagttagtttgttactttaatttgagcatagacaatggggtcaaagtctgcagaatggttctcagccaagtgattgctcttttcttctgagagtttgaaagttgtgctggcataggtaagtgattcccctgggatggatgaaagctgcagagggagaaaaaggaggaatgagtgagtccagtctggagcaaaaggttgctctttagaagcaacctgagcactttggtcaaagaatcacttgcccagtgtctggaaatcaataccaccattctagcagataatgaagagtatggaggggaattccaatgacggtagcccttcagtgtccccaaaacagtgtggtcatcttaccttggctggaggatctgagtgaggatctggggcctggggcttggagtgatctgccatggtgccagaaagaagagggacccatctcagcaatgggcctggggaaatgggaagcctctcccttcgatcttgggtgaagggtggggtggggaggaggtgttgtcaggtgggtggggggcagggcggaagaaaaatgaagggatttgaatcttcagtctgcagacagggtgggctaagcaggttttatcacactgcaccctcccctacctcctcccattactcactcatagctaattctagtatcaatggcagagagagaagggctgtcctatcccttggagaccacttacattttctgtagctctttatgatgaggaagataaaggctatcagcagcagtgtcagtagaaccccagcacaaaaggcaaggattaaatgttttttgctgttttggcaaagaaaggcaggggatgaactgttgggcttttgaaggcctttcctaaagagtgaaacctttcctgcctatggatggactcctgaaatggttttcacactgattaatgaactttcacccagtggttttcagcttttgcttttgagtttcacatccatttgaggcctcagaggaagctgtggcctcttcctctccccctccctcaacccacacaatgttcataattccccacccagcaaattttacctataagcttaggggatccatggatctcttgaagcttaggggatgccaaattaagagccatactcctgagatcacaaactgactttgttcttttactgtttctagtcctttctccccagtctccctgcccaaatccccaagccgaggctgtcagcacaacatcaaatcccacgtggtacaagatgaaacagataggagaatgctcatttacttgtggtggttagagagacagggtgcagggctagttgttggggctgctgtggagagagtgccttgtctttctacaagaaaacacaaaaggaattagtgtatctgtcacttttcatgatacccttccagcttaagtttccccaggtgccccattctacccaagcaaccagtggaaattaaggatggggctgcaactcttacaaaaatgagagaacattgttttttagattccaagtacttttaaatgaaaaatagaacttaaaaatcaactacatacatgaaatacaagcctagtgttcctttgattaaaaaaaaaaatctcatatgttgctctcctcaaagattttaataggaactcctgaagagatatgctccctctggcctaaggaaagcatctcccagctagggagaaacaacaaatgcttcccaaagtccttggggaatttgaccttgaaactgctgcccttttatgtttgccctttttgcagagcagctattagcagtgcctagccaaaaacagccacagtggttttcccaatgcctacaccacaaataggggagcaggacccacctagtttgatattgagcagagacaccctttactcagatttggagggccaggcaggtctctgtggttccccctttcacccctcctggcattaaattctgtgtcctggtaaaattggattcttccagtttcagaaatgcactagctagtgcctttccattacagcccttcagcacaatttctagttattttaactcagacgtgaggcaggtaattattcctgtcgtaaactcaccagtgtcgggtttacatgtggagccattgcttcccatgctgtcatcccctgagaataaaacaaggtatctcttagaaagcttggaagggagagccggcttaagggccagctctgagactgtgattgtcatataagagtagtaacaatgagaggcaatttgtgggtgttctagtgccatcagtggtcacagatcactcatcagtggttaacaattctggtgttgtttctgcagctcagcagccagccttcaggtt

SEQ ID NO: 818 - DNA, 481 bp, Homo sapiens
aagcctcaggctcttcaaggccctccgtcaagcaatgatgccatggtcatggatgaaaaggtcaagagaagctttgtgctggacacggcttctgccatctgcaactacaatgcccactacaagaatcaccccaaatactggtgccgaggctatttccgtgactactgcaacatcatcgccttctcccctaacagcaccaatcatgtggccctgagggacacagggaaccagctcattgtcactatgtcctgcctgaccaaagaggacacgggctggtactggtgtggcatccagcgggactttgccagggatgacatggattttacagagctgattgtaactgacgacaaaggaaccctggccaatgacttttggtctgggaaagacctatcaggcaacaaaaccagaagctgcaaggctcccaaagttgtccgcaaggctgaccgctccaggacgtccattctcatcatttgcatactga

SEQ ID NO: 819 - protein, 159 aa, Homo sapiens
  VARIANT (1)...(159): Xaa = Any Amino Acid
KPQALQGPPSSNDAMVMDEKVKRSFVLDTASAICNYNAHYKNHPKYWCRGYFRDYCNIIAFSPNSTNHVRDTGNQLIVTMSCLTKEDTGWYWCGIQRDFARDDMDFTELIVTDDKGTLANDFWSGKDLSGNKTRSCKAPKVVRKADRSRTSILIICILX

SEQ ID NO: 820 - DNA, 92861 bp, Mus musculus
  misc_feature (1)...(92861): n = A,T,C or G
tatgtgtgctgtggagggattgatgtatatgcatgtgtgcatatgtgtgcatgcatgtggagggattgatgtatatgcatgtgtgcatatgtgtgcatgcatgtggagggattgatgtatatgcatgtgtgcatatgtgtgcatgcatgtggagggattgatgtatatgcatatgtgcatatgtgtgcatgcatgtggagggattgatgtatatgcatgtgtgcatatgtgtgcatgcatgtggagggattgatgtatatgcatatgtgcatatgtgtgcatacatgtggagggattgatgtatatgcatgtgtgcatatgtgtgcatgcatgtggaggacagaggtgaacctccagcaccttcctcaagcaccacccagtgttctaagcaggctagacgggctggcagcaagcacagagacccttctgcctccacctccccaggcttgggattataaacccgtgcttccaggcctcagatctgccacacggctctgtaaaccaggcccaggtccttgcgtttgcaatgtgcattactgactgagcaagcttcccagccttctccccagcccagaggttttatgcatagaaaatgacttcagtgttttcatatataaaataaaaagggaaagaaaagaaactgtatccaaaatcatgacatgattgtgggatttatttatttatttatttataggttatcgtgacgtgtgtgtgtgtgtgtgtgtgtgtgtgtgtgtgtgtgtgtgtgtgtaatacaacctgatgagtccatttagtacatcagattccatttttctaattacttatctccagtgaagctggcatcccaaattaatgtagcttttaaaaataatatttgcattagttttttgagaatttcatacaatgtatcttggcatttccctcctagatctactcctgcctcctcaacaactccatactctctctctctttcttaaaggttcatttatttaatgtatatgagtacattgtagccgtcttcagacacacctgaagggggcatcagatcccatttcagatggttgtgagccaccatgtagttgctgggaattgaactcgggatccctggaagagcagtcagtgctcttttaagatttatttatttaaattatgtatgtgtgtacactgtaactgtacagatggttgtgagccttcatgtggtttttggaaattaaattttactccggtcagccctgctcgctccaagcccaaagattttattattatacacaagtacactgtagctgacttcagacgcaccagaagagggcatcatatcacattacgggtggttgtgagccaccacgtggtttctgggatttgaactcaggaccttcagaagagcaatcagtgctcttaaccgttgagccacctctccagccccacaatctgaactcttgcctgtgtgatgtacagtatcttttctatttaaagatttatttatttattagatggaagtacactgtagctgtcttcagacaccctagaagagggcgtcagatctcattacagagtgacccaccatgtggttgctgggatttgaagtcaggaccttcagaagagcaatcagtgctcttaactgctgagtcatctctccagcccgatgtacagtatcatgaggcctctgaatttgctccccaggactgtatcttgtcctcactatcgctctaatatgtttgctaacgtaatattccctttcaagtttgattatttatacaactagttgagcccagcagcagcacaaatgattagggtgcataaagccgtgggttcagaccccagcactaaaaagagaaggaagacaatgacgttttgcctaaacacacacgtaagagacagtttaagatgctgttttccaaggcttccaccctacaaaatgctccatgagattcaatttggagctgattaactgtatcttaaagcaggctcatctttcagggctcagcggggcctctctccccatgacttctgtgatcacctctgttttctctctctctctctctctctctctctctctctctctctctctctctctctctctctctctctctctctctctctctctctctctctgtcctttgcgcttcctcctgggtttctctttagatcccattgtcccagaggaaaaacaaaaacaagacaatcaaacagaacacaagatgccttgtatatctagtgtagaagagaaatcgtggctcaactctcattaatcaaccgattagcaagagttttgcccaagaggcccaggttctgccaggcagggtagagttcaccagccgctcactttgtcttgtaaataattacttagagtctgaggcccatgagctctgcttgaagtcttctggctccatcttctggattaaattgtaagtatttggagaaagaactgggtgaaagtccacagagcagggtgggactgagggaatgaaatcannnnnnnnnnnnnnnnnnnngattccaggagctcctgacccgttctcaatgatatcacccccatcccccactccccctacccccacccctgcccagccggcctcagggagactggctgggccagctgctgccaatctagtgttttatctgtggggtcatgacctgcactctagtgcttcctactcttccctgtctagacttgcagtccacggtctgacatcagttcagaggcgcccaccaaagcctctgacaagggccattacaatagccaagatgagctgaaagcaaacagatgaaagcagtaaaaattagaactcactcacccggaaaaggctgaaggtggatgagctcttattctaacatctttgtacacaatactaaggcagaaaaactcttctgattctgtgccgtttatatttagcggatacttcaatatcttgatcttttttaaatgtatagcaacaggcttttatgaagaaagtccatttgcactgtagactccgttctaagttaacttgcccttaggcaagggcatggcccctgcccttgaggtctgagaaaaatcacaaaatgtccctggaagtaacaaaatagacatagtagctgctgctagctgataacaacagagtgggctaagaaaacctaagtctttcctaggtcaaggtgctccggttttgatgtacgctccctccttatggtttaaccaggtgctgtaaaccaattagtttaaagaccttccacggaccgggctcaatcggcccccctcaattcgtggggagtcaggggttccggcaggtggacatagagtcggcgagaatggggtgacaaacagacatgacacgagagagtgtgttggatctgaatgtaatgtcaaattgagcatcaaactttttatacagtagaaaatagggaagttcggtgacacatcggcaaggtacaatgagattactggatgcttaatgactatcacacaaaacaggaatgcaaacacaaagactggcaggaactgggcaataaaacaactgagacaaggtcagctctatctaaggtcagctatattctaggaagccaggtgtgaggtctttacactcccagggcaagggctttcatgcccaagtcatggctctaattagggagttccgttctagctaaccttctcatgaataatgcaatactttaaaaccacagcttgatctaattcctaaaccattgtaaattcctgtatatgggagtgacttggcttttattctaagtgattgtgtgtggggactttctactaataagtaatgtagtctgccatacataactataataagaattctaaacttggggctggtgaggtggctcagcggttaagagcactgactactcttccaaaggtcccgagttcaaatcccagcaaccacagtaaccatccataacgagatctgacgccctcttctggtgtgtctgaagacaactacagtgtccttacatataataaagaaataaatctttaaaaaaaaattctaaatttacgttgctaagcttgccctgagatttctaactctatgtagtatatagtaaggcctgatttctttcactatctctcttacaatactagaggcaattctgaatgtcactgaataggcaactttcttaccaagaccagagtcagctcaaggactacctagggtattggtgaaggccaagaagcaaagttccattttgcttaggtatttggcaagtcattgcttggaggcacctataacgaaacaatactgaaaggaagcacacagatccattcaccaggacaaaattggagcatatgtgctatgggatgccacagttccaggagactaagtttccaagaaactcttctccttgggactgcttccaggtttctaaacctgtcaagcaagtcactactggagtggatgtagcaaagaccagcattcctttaccctctcaggtaacaccaaggcttagaaacacccgcttgcagttttccccctgcttgcagggtttttccccccgcttgcatatagacacaaataagtatacagaaatgcagataaatgaatgatggatagatgggttagatgtgtaacaaatttttgggcaccctgagttgccttcgagacaagtgtttgaaaaagaacaaagttaagtcgtcaagcaagttgacatttggaaaggtatcaaaaggtgtcactgaagccatgatagtgtgaccagaaactggtgagttgcagctggaactatgtgtgcacctatgcaggtcagggctgaggggctggaacatccctgggtgctgttctgagatggacccctcagcctgcttctccagcctcctgagctgctcaggtccacacacacgagagagagagacctctcacggtgctctgcgcactaagtctgagccagaacacaggacgcctttgttctgaatttgtatgaataaattgcaaacagtgcttggtgcgttttctagggcttccatgaccaaaccccacaggctgggcagcttaaacaacagcaaggcacttcctcacagcactgggggcttgaagcacagaacacttgcctgttgcccagacccctgaattgcaaacggtgccttctcctggtgacttcacaaggcctccgttctgtgtgtgctacagctgaaaactgttttcttgaaaaacaaaacccagaaggctgagactgtctcacctgtgccaccctggactcctagttaccttataactaagactgtccttggaattctattcctctgcctcctctccgaagcgctgggattgcaggtgtatgtagtattggaaatcaaagttgggtctcactgcaagccagacagatactccatcgactgagctacttgttcagcccctgagtagatagggtggaaaccctccgtaagtaccacgcttatttaactctaaaattaaaggggttacattaaaaacctcatctccaactgctgaggtgctgggtgctggggtgtctatgcctgaagttcagggaggggcttaattcagtgaacagttaagtacacttcagttatctagagcgctcgctcagcagtctggagtcctcatctcggctgttccacacgtgcagaaggcatctcctccctagccacgaggaggaagcggccacagaagtggaaactgcctcagatgggagatgcacaacaggctggaaagcaaaaggggcagagggacttctctagaggtttctgtttcccagtatgtaggtcaccatataaaccagcggtgcaggaactgagccaatcaaaatgaccgcaacagcagtttatagaaggtcgtattctggatcagagttttcacactgataagtctgggtggccctggaatatgtccattcaaaccccttccagaaagttctaccctgaagccacagcattagagatgatgagcaggtactttggggtctatgtaccccacccagatatagaaacaactccccacccaagctaattcactaaatagtctagacaaactctcccgtttattacaaattaaaagggtctgtttgtatcgcagttaactaaatctttcaaagagtatttcacaccagccagaagtcatggagcttgtttggagcccacttacgttgtagaaaaagaagactcatctaagttggccattttaaaagacaagaaaactgaagctgataactaatgcgttaaatttggcccaactcaggcagctggcatgtgttagagtctggccttgaactgagttttcataacctcatatcttcctgaccaataaggtagggcatcagctaaccaatcccaaacagtgctaagtttcataatagataaaatatgctagacaacataaaaacgtatgagaaaccacagcagtttaataggttttgatggagcatacagcaatgaagtatatacatggaatgtaacctgccttaaaatttttgaaataataataatatttgataggtgaataacaaaaaatgtagatacaagagcagatacctagagcagaagcaatggaaaaaaaatctactggcttacagtgccatctgctgctgggaagtggtaactgcattagccctccctggcagggtttttcaaggttggcctaggaaggaatcttactcatgctatataatatagcttgtgttaaacatgaatatggactaagggggaaataagtattgtagaactaagggaaaataaactgtagagaaaaagcatagtacaccagaaatggctctgctgccctgtggtaggaagccgcctagaatctttcaaataagaaagtgtgcatagtttactcctgttctgtggaccttacaagagtcctacgggttgtttgtttgtttgtttgtttgttttctttcctagtcttttttcttcaaagaagaagtgttatctttaattgatcatctctctcctacttttcccccttttggctaaaactcacttgctttggcaatttagctttcatacaaatgccatgtgtttttataaatcgtaggttttcagagctgggaaaagccctccagcctaggttttcgcattcacaacaattagctactctttctctgtgtgtaccaagatgtaccctgcctccttctttctctgttttctttttggcttcacaagaacgggggtgggggtgggggtgggtaggaggagttgttggattacaaacttcaagataaactctcctgagaagatctccatgtattaatttctaaatcagagccaagtggtgagtggggttagtggcttgcctggctttgcaactgtacacattttctccaaacagacaaggtaactgttgggtggaagaggagaagaaggcctaggtaagctgtcacagttcaccttgccgccacatagagtggaaggacgccagggaggaggaaagccctcctctgggtttatctgcctgcagaaaggattaactctgagggagcacccactttgaatgtagactttctccagccaaaggcagggggctcgggtgagacaagcaggaggaaggagagagccccctggttctttctctttgctttccagccatcacagagagttccttagctccctaaaccctccagccacggtagagtgaagcctcgagtcaaaataaatctttgcttctctaagtcgatgtttgtgtgggtatctatcacagccatgaaaggctcagcgaaacatagcggaatgcagcaagactttaggaaatcaatcacaagttgttttttctagaagcatttgtatacattaattgctaatgggatgggtatgagatacttggcaagaagcaaaagcagatgacattcttgtttttcagtagtcgtgaagagcaaatctactctcacatttcagagtagacaaatgagctctgccaaccgtgacatttacccaactagacaatgaaagtgctagtctcgggtcaccaagaggctgacatttgtcctacaggtctctgtcctatgccatctcccaatctccaaaccccctgcttcagctcttcctcgctcccaggcctttgattcaaataggatccagtagtgggcattcatagctaatgacggagttattagtcacaagttttctttcagggtgttttaagttttccttctgtatatactcaaatttttattttggtttgtctatttaagacactgtagatagggttgatcagcggagaagatgtagggaaggaatttccaggtgccttggaattatttctcccactctgacaccttacataagaaagggcactaaaagcattcagtggcacttctaagtgttacgacttgtgtcatatataaggaaacacatctaccacatggtattttctccaatgagcatctccagatagcacccatcaggaccaggtttcagggaaacacaaagaattgtcttcacactttgaaaggagaaaatggtttctgaagaccggtgtgcaccataaaagacttgagtaagagacatataagagactggtgcagatacgtggtggatgaaagtaggaggtttcttcaccaggtcattcatatatccagaggccaagagatgtgacaagatgtgacaagagatgtgattgtcacgcaaacactgccgttccttcttactcagcttctgccacatctcttccatggcttaatccacactgttactaagtggagccaaataagctgtcattctgatcattttattctccatgtctaacagagctttttggttctgcttcatctttattttccggcttcatcgatactaccgtaatcatcacagtaaatataaatatacatgctgtgtgtatttaagcctctccatccatcggttctggtactaatttgtttgagatgctgtggctaaactgtgctctttctgtagttgtgcaaatgtctacttgaaggggggactctaggggatgaattcagggccccctggaaatccagctactcgttctgagaagcctgcattcaggaatgttctgagagctaagagtgagaaggaagataattagcctggaagggattcctccccgcacagcagagatccattaaggatcattaccctctaaccactccctggttattttttaatataatatttgtactatcttttactatttctatacatacatgcaatatatcctgatgctattcgcctctaacttccaccgaattactcacacaagtctctgagaacatcccaaaagaggaagcagaaagattgtaatagccaaaggtcggagaggaccagagcgaaataatatcttctgaaacatgacgggacctctgcacttagtgggctagcagcctgacggtgtggaggggcaggtagatgggttggggcagagaaaggggaccgagaaggaaagtcctccgcagccctttttaaaactcctcacctcagcagcgctttggtgcccacctgaatgttgaagagaaaactgttcttgccagggacattcacactggatgtgcttcaaagggtgcccactggaaaatcagatgatgatgcaaagaggagggaagtgagcaccccacacacaaaagggagagaaagagacctactgatagacagacagagagagagagaggagagaggagaaagacaggagagagagagagagagagagagagagagaaagagagagagagagagagagggagggagggagggagggnnnnnnnnnnnnnnnnnnnnagagagagagacaggagagagagagagagagagagagagagagagagagagagagagagatattaaatcagtcctctgagggctttgtgttcctgggactcacgctggagaagattcagccttatagaaatagcagctggaatgatagacactgagccccttgacagagtgtcgccattgctgtctgatcttagctcaaggatgacaacagattgcaacttgatgcgcctggaagagaactggtgaacctttcagggcaggattcggcacacacaaagcaccacttacctgtgtgtgacacacccctgcaagctccccgccctcaggaatgatccctgaggcctcacttctaactccaggcgctggcaacgggcccaggcgtcgcacagtggtcaggagcacttcctgggaaccggtgctgcgcaggtgccacccccgctcccagcaggtcctcccagcctaaagccaccacggaaagggcgtgtctaggggaccagcgccctggacctctaggaggcgctgagccctgctcgccctgccgcccctcctgggccacttggcccggtcgccgcacctctgtcccgtgtgcaaggcgaccaccgccgccgccaatcccagatgccgggtaccatgcagtgcttgggcgccgagtacctggtaagagcgacaacttgagtcctgagagaagcggcctctgcgggcacctacctgcacagacaggacgcttccggctcctctgtcctttgggagataaaccactttctctcagtgacaccgctcctttaaagacacctggcactgaggacccagtacctgacacaagtgttgggctgaggccaggaaggcgcaagggactagggggtgaggggtgtcttacctctagtaagaacttggcccccgggggggtttcacatccatcctgcagagagctgatcttccccagtgatagagttgagttgctttagcagcctttggagaggtttcggttcggttgatttcacctaactgtttctcttgcttttctcaactctccgttttcctggaaggtttctgcagagaaaacaaggcaaagagaatggcgaccccaaatttatagaaaatgcaccgatacaccgtggctagtcttgttctttctcttttggactggtttggtaagtatggctgcttggcaggcctaaatcccgggtgtgtgtccagatacaagtgtgtcttagacgttactggtttaaagtttatgctgcaaggacaaacttctgtgattggtttagaatgaccatgagttaagaaattcttgttctgggatttcacaatctcctaaactctctgggaagactgccttcctgccggagaccaagatttattgggtaattccattaggatatggagaatcacagcttgcagcagtgcctttcttctttggctttgtaagctctcagagtggaagtccttttacatcatccatacccctcagtcaagtatttctcaacatttgctgttttctagcataggaaaaagtcaaggtctagaaagagactgcttttttaaaaactgtgtacacacagagttatacacacacacacacacacatacatgcacggccttgatctactgtgtttaacttgatgcaacccctctcatagcacacttgtatacacgatcgatggtagaccctaccagaccctgccgtgacatccgaggagtctctcagagctgagtcttgacacttattcttagagcttcattcactttgttcaaaggctgtgctaatgaagtcacccatgccgggttgggtcatgctgtgtgctgtatagttaatgattcactcaggttgccctataatatctacctgatagtaattacctttgttaagaagactttagtttgaattgactgtaaaaaccacatttgttctttccaagtaaaggacgcattcatttaatttttaactttccaaatggttttgcgtagatgtggttagatacacagagaaaggctgggcctggatgtgtttgttattgctgctgctgctgctactgccactcataaggccctccaagctctctttaaggagctcagagaagtctgtgtacctacctagtcctgttgccttccctatcgttggttgccatttctctccagttctgctgttatgtaaatatagggagcagctgtccctcctgcgtctgcagctttgaccttgggctgttaatgttatttaatgatcctcccttgcccctctgctgctcaaactctcaggctgcctagagagaagatcgcatatggcccttcccagcctaaagaattattagccggctgagacattgcacaccctgagctggaaactgcagagaaagtacactttgtttgtaagagaaatctaaaggtttccatatgcccagattctcttcactgtgttaggcataagagttcttttttagctgactggcttctttcatcttctgcaaaaattttagcttcagatacctgtttaaagcaggacaaggtatgtgtgtgtgtgtgtgtgtgtgtgtgtgtgtgtgtgtgtgtgttcactgctgcacttctgggtcttgtgatggatataccaactgaccaagtgtaggacaggattattactgatggtgctggccctggctggggatagataaagaggcttatgggaagatgccaggcttgcatccagagctgtccctgcaaatagaaaggacaccagcctgtgcttatgcttgtatgaaattcataaacagaaagcaagcctgaagctctgaattctccctgcctctacttaccctccagtgtcctctcccacctcactctttcccagttatctttcaacactcccgtttacccagacccagctcagagcaactgcatttgagatcacaacattccagcacacacacttcctatagctctgatactggagtgcctggactctgaggccaggagctggccaaccctagcttaacaaaagaaatccaggccacagggattggtgaagaagagtgtattcatttgcaggtttgggcagaactggagagcagaaaagttggttgtgtctttccaccttttctgttggagtctcagaagccctgaaaacagagccaggaaatactcctatgtgaaataggtggcgtgatagatatcaatgcggtgtgaaggctcttcttgggagccgtgggctccctccttgcagggagtatctggggtgccctaggaaagctttaagtctttgatgtccattttccaagggtcttttatgctgcccactctctctggtgtggaattaaaaccacagcaatggttcacagtagtgtagagagaactcaataaaccctagtccttaccctcctcacaaacttcccatagacgatatcacatgcgaaaccataatgcatagaaaatatgttgttattagataactctctagtgatataggcaaaannnnnnnnnnnnnnnnnnnnnnnnnnnnnnnnnnnnnnnnnnnnnnnnnnnnnnnnnnnnnnnnnnnnnnnnnnnnnnnnnnnnnnnnnnnnnnnnnnnnnnnnnnnnnnnnnnnnnnnnnnnnnnnnnnnnnnnnnnnnnnnnnnnnnnnnnnnnnnnnnnnnnnnnnnnnnnnnnnnnnnnnnnnnnnnnnnnnnnnnnnnnnnnnnnnnnnnnnnnnnnnnnnnnnnnnnnnnnnnnnnnnnnnnnnnnnnnnnnnnnaatcctgcactctagcctagaaggacagaagatatgccaaggttggatcaacttatcaagcaggctacgtaggcacactgagccatacttccgtgcactgccttgaaacagaaaaagagtgatcctgcctcttagcaaagatacctgttcccctaaaaatctcactaatgaaacccaggaggaacttgaaaagtgggaagggacaagggtctcctccccatatggtctacagttgataagtcctctttctttgggggctggaaagtctggtgtcctcccctgagccttttttccaaccttgactgaggacagagaaaccaatcaccatcatcagcatcagcatcatcagcatcagcatcatcatcatcatcctggaggctgaattttgagggtaggcactaggttttgtgtatctttgtgttccctagtaacagtctctggcatgccctgggcacctgaagaccatttaatactcttggttttgagaagggttttttttttttggtttgtttttgtttgtttgtttgtttgtttgtttgtttgtttgttgagacagggtctcatgtaacctgggctggccttgaactcggtcttaaactcctcctggtcttccttcctctgcctcctgagagctgggctttcaggcatcctccacctgatcaggttattgattatttttatttcaaaattgacaaaggaatgcagggcctctggaatacattggctttaaggcagtataactttggagtatgtgaccatacctcatgttagtggatagtgtcccgcagcctctgtccctgaataagcttgccggtaccatatactttcaggtgacattctgtatggaaagactggtaaacttactacccacactcttaactaagcttgtgtgaagagaagaaaccttggcagaggacgatcagatggatatgaatagtacagttgtttggactgaaatttcaaatattccacactccctataaaagtggagttacaaaacaacaataacaccaataccaacaaaataacaacaacaacaacaaaaaaaaaaacccacctgttgattgcaaaatgcccattgccaaagtgaatcctgaaattcttttttttcttgtaagttttttattttgtgaaatttaagcaagcaacccaaacactccttcagactgtgaacagtgtgttgatgtgtataggctgggcagccttgataagaaataaataaattttctaaagaaagacgggatgtttgatagctcaggcactaagtgttggtatttggagtaaaaggtcgtgaatttgatcagaggtggggacaggtgaaggcagatgcatctttggggctcgttagtagccagcctagaccatgtgttgagtttcaagccagagagagaccatgactcaaaaatacacacacacacacacacacacacacacacacacacacacacacgcatgcacgcacgcacacacatatatacaaaaaacaaaataaagacaaaaataaaacaaaaaccaagtggatattgcctgcagatcaagtcaaagttatcctctgaccttcacacatatgcatgcatatacatatgtgcgcccacacatgcaaaccacacacataagcacatgggaaaattttagcacagcctcagtgctcttagataacccaggcatgctgaagtgataaaatgaagttatcccaatcaagtttgtcagaaaaataaaaaggtgacagcctcttgaagaagacaaagaggaggggaatctgggtgtgctagggcatcctccctgctcacccgctacaccgctacaccgctacaccgctacaccgctacaccgctacaccggctactccagcattcacaaagccggaccctccctgagcagtgcagttgctgctggggaagggagggccgtggagatgcagaggctcctcatttatctgcttgtgtttcacactagcatctctagggatgtgaggggcagtggttttgctgtggccaggtagtcacgcgcccttgggttttgccaggtgttcatcatgggttattcggtggtggccggggcagcaggaagactcctctttggatatgacagctttggcaacgtgtgtggcaagaagaactccccagtggaaggagcccccctctccgggcaggacatgactctaaaaaagtaagtctttggggggttagggctccgacttagagaggggctttatttcaaaactttgcaatcatttaagaacttggcagtgtttcttatttgaaaccccggtcaacccatcttaaaaagcaagaagctgtagaccaggccaggcctgggcttacattcggcgtctgctatgtctcagctctgcgatctggctcggagtccccagcctctcggaggccagttttcatctttttaaactagtaattacgcctatctttccaggctgttctaaggatccagtgaacctgtgcctgaaccaaggcttagcagatgtttactgttcccctgacagtgtctcagactcagacttgtagtgtgctttaagctttggaggcaaaaataaaaagggaactggcggtttcctgggttggtggaagagtggggagggagtagctctttcctattggaacagtttccggaggctggggacaaggacggttgcacagaaccatctgtgcatttagggctctgaactatgtgctggaagtgattaggccaactggatgtatattttaacataattttaaatttttaaacaaaataaagtctgtgggcgtcattcacccaggaaatctatcccaccgtctctcttgtacaaacttcctcccatgccctgtggagggagagaggcttctagacgcttctgccacatgctcacccctctgtcagcccccagggttcttcctctgcattcctgtgactttagcagcctatatcctgagccaagccacaactgatgacaacagggagctctgcggctgagtagccccaggcaaggtctccatgctgtcctgactcttaagctgccttaaattcccaacctcagctcccaatggtcatttccctgagttctgccacgccctgaaatatatttgaacactttggagcagtttcccattaaggcacactatgggcagtttctagcacacagtgagcagtttaatcaatccttctcctcctcggtgactcttcaggtagctcctgttatattcccccacttctcagatgcagagcctaggacacgcaatgtttgctcacatttgaaccaggctcacaaggcgcccccggttggtttattaaatacttctttagatgcatttggctacaaagtttgccttcgtcctgcccccatgtggcggtgtgtgctacattttcaaagcccacagttacaccaatgagaatcggtgccctgaggcatgcttttctttcctccgtctttagacacgtgttctttatgaatgcctgcaatcttgaagtcaaagacaggggtcttggtcccacagccctctgtgtatccagctgtcctgagaagcagctggacactctggaagaggtccagctttttgccaacatcaacggtaggtgctgagaaccccttctttctccacatcacctgagctagcaacttgtagcgtggcagataatgtaacttatcgtgaaacactttctctgaaaagatacagagtatccacctctgcagcaccccttgtgtggaaaggaacaggagggttttctcatgaacttgctctatgtcatttgtgtccttatggacttatctgaagccctggctgctcctcacttcctatagtaaagggtctccctaagagactgaaaaggggacagggagacacaaggtccaaggttcacagtcaaatcagccacatgagggtttttttggtgaagttgggagggtcagcaggcactttccctgaccagaaagagagccagaagttgtactgaaaccacttggtccagatagttcagacttaaatgaattaaaaagtgaaagtaaaaaaccaatacaaggcaacttgtgaattttatctgtctggaaaatagagtgtgagatctacaataaatcatcttccggtaaccttcaaattattttgtgccaattctacagtttagtgttgaatttggggttttggagagaaagggaacctgagtccaccctggatggtacccctgctctttccatgagtctgggttatacattcgaatccctttctgctatggtaaaatggctgtgggttctttactggctttccaaggaagatggatgcaagactcaaaagcagcctgtgtgtgtgtcttctgtttccaggctctttcctgtgtgtgtatagtttgaattccttcaactacactcagagttcaagtgcagacacactgtgtcccaggctcccggttcctccaaggtaagagcttatgggccagtacttgatgctgcctgtacctctgctatacacggttaaaaataaaagggtgcaggtcccagtgagggacaaataaagaaggactatttacgatacacgatacatataataaacaatggcttgaaacggagacaactcagccaacagtaagggtccatgggatcttcagatgctagtgctgggtggtcgggatggctctacggtgaagaaggcagttgccacaaagcctggtgacgtgagtttcatgtctgggacccacatgatgtgaggagagaacccactcctgaaaatctcctcttctatatgtgcaccatggtgcacatcacacacacacacacacacacacacacacacacacatgtacacacacacacacacaattttttaagacaatgaaaacaaatatataaactatcaaacaaatgactttatgacaaggctaatgtacacttttccttctccagttcttggttactatttagagtgaaaccatcaatattcacactttcattgcaacagtgttgatagtctttgttgttcaagattgtgccagaaaaataggctgggggtctggagagaaggcttagaggttacttaacctctgagtacttgttcctcttgcggaggactttggatctattcccaggatccacatggcatctcataaccacgtgtaactccagtctcaggacatccaacagcccctttctgacctggactggcatcaggcacacatgggatgcacataaaaataatttttaaaaacatttctgtgtttttaaacattttaacattttaaacatttctactcaagttaactttattagaattttacacaaggttgtacactgagattttaaaagctgtttatatatattatatatattaaatttatgtatacaaattatataaatctatatatacataatattatacatttaatattatatataatattaaagcaagatataggcctagaagggcaaggcttcttttttttaagatttatttattatatatatataaaagtacattgtagctgttttcagacagacacactacaagagggcatcagatctcattacagatggttgtgagacaccatgtagtttctgggatttgaactcaggacctccaaaagagcagtcagtgctcttaactgctgagctacacttcagtgggtgatcccacatctagaagtatatggtcagcacaaattgcactctgtggaccaagagagagggggnnnnnnnnnnnnnnnnnnnnnnnnnnnnnnnnnnnnnnnnnnnnnnnnnnnnnnnnnnnnnnnnnnnnnnnnnnnnnnnnnnnnnnnnnnnnnnnnnnnnnnnnnnnnnnnnnnnnnnnnnnnnnnnnnnnnnnnnnnnnnnnnnnngaagtaaggaaggaaggaaggaaggaaggaagaaagaaagaaagaaagaaagaaagaaagaaagaaagaaagaaagaaagaaagaaagaaagaaagaaggaaacaaaaccaggacacaaggttatgtgtctagttggggagtggatctgagagaagccttggggaggactggaggtgagtataaccaaaatacattgtatgaaatcctcaatgaattaataaaagtgctatattaaaaataatcacaatcctccaactggttgtaaatacagtttgaaaaataccaagcttgaaagtcctaaagatgacaagcaggatttaaccccgtaggaggcgtaatcagccatcttgtagcgttcttctctaaaatgaatgctagtgggagggaatttggacaggaaaggattatctgcagagaaaggtactcaagtcactttcacagtattttattttttttaaatatggttatcattgcttgtcttaatgaaacacaagtgaaaaaaaactggagtagtttagtgggtgggaggaaattacattacataatgctggacacacgggtaatggggtttggaatgttgttgttgttgttgttgtttgcttggttttttttttttttaagcaatgccataaagtgtgcctgcagaaagaattgaaaggagagaggcagacagacagacaatgtgtattgtgtttgtgtgttgtgtgtatgagagagagagagagagagagagagagagagagagcacataccctccaatgtaagcatgcagaggctagagagactctggggtcatattctgacacaccatccacttctgagagacagggtcttgttgccctggagctcaccactgaggcaccatctctgcttctccagggatgacaagtgtgtgccaatacctccgacacaagttttggcacaagttccttgcactcaatactctcacaaggcgagcacttcactgcggactaagctataccacagccctgagaatggaatttttccaaggtttccatttagagttggatcaactgtcctctctctgtcgctgggatgacatgagaagcttacagggtggcacaggtgctgaactcagtgctgatttgtggcgctctccctccttgctgcttccttttgtaacctccggacatgtgctggtccgctggggcctcacagagggtctgcactgtaagtattgtcttatagaggagaagactgatcagggagaggttgagcaagcagaaatgttggcattccaaaccaagcagggcccatattggtttcttgaatccagtataagcaatgaagtccggcttggacaacctagtgagtggcctccttaagatcaccccacgctgggaggagaaaatatatcacatgtcttggagctacccacctcctctccttctgaagccagccccaaccttttcaccttccagtgcagaccttgccaacactaactttccaagtgcggacagaagaagtgattgactggccctttttggacaaagcaagagagacaaaaataggcttgggggcaccgtttccttctcctacacaaggaagcgtttgtttaagatggaaattatcatattgatcgtggaagagctgtgccaagccttaaaagctacagaacatgagaagcgtggccacaaggccaaagaacattttctaaatacttcttctgactacatcaattgttccttctgcctgcgtcgatcatggaaggtagggcaggcccttttcgagcagtgggtgggtttcaggaaggcatgggcccctgtgcatgagctctgacgagcaatgaaaaagtactacagaagatagcaatgcttttcgctttgatgatgtgcagagtgttagcgtagcgccatattttgggtcttccatgcatttgaaatctaaaaggtttgggatgctccccacagtcctgcccccaactcagttctagttctagcctcctgtttgacactgtgccatttgcttgagtgaaatccatatacaaatgtacccacatttatccgggcagccgatcagactacttcctgcaagttggagtggttttgctggtggtgatgaaatgcagaaatatggaagaaacctcaggctgtggtctaatgcaactctggccaaattaatgatgagcattttcagtagacagctaggtaggcacccaacataaaagacccgatctttacatgtttctctgtgcccccttcaggataagatgagtctttttgttattctgtatcagcacaggattagtgaatcacataacacacacacacacacacacacacacacacacacacgttagcaaagtcacatgcattaaaattaaggtctagtgtagaataatatttgcatcaaaggagtaaaatagcattaagtctgtgtttgttcttagtttttagaaaccctaatgaaacttaagagtacatttgcttttaaaactcttccaatttattggtgttgtgaaaccatttagtggcagcaaagcaaaagaaagtagaggtttagaaatcagaaatcgggagtaattactagtctgtagaggaaatgattatagacctgggaaactaagagaaccaactggaaagcccctgtgggcaacaaagaactcatttgggtggcgtgggatcagctagtgtactgaaatctacacattcgtgggtttttaaaaaaaattctaatttactacagcaggaacaaagatcacataggaagacatgaaagtgcctagaaatcaatttaacaagaaatatacgcgaacctcaggaggaaaacatcagtgccatcttaggtgcactgaaaaagaaagcaagcagaaatatgctctctgtcaatcatacagtccaacatggacagactcttgtctattggtctattagtttatcgttctggcatcgtacagaccaacaggatgagatccaaagctgggaatttattgcacgataaaactggcattgtaaatcaatggcgaaatgtagactatttgataaatggtattagatcaatcagggagacatccaatggattggcttttttttttttttttttatagaaaatgaaaccagaacatattagaagctcacaaggattctttcacaacctgaaagtagggaaggcttctagctcctaccgaaaaccaaaaagagacgggccatgtgtagaagcccatgtctgtcatcttagcactctcagaaggctaaaacaggaggattgccataagtctgagtccagcacgaaataagtaaaattttaatttggaaaagaaaaataagaaatctggttagtattatactcgatggtgagcagccgatgctttgtgattaagatcagaaagaagagagggtgtctgttccaaacacttctattcagctctgaaacggaaggaaaggtaacaggcaaggaaaagaaacagaggcgagagggaaagaacatgtttattttaaagtgagtaactgttctagaaatatccaaaggacctataaaatattaagcaaattgagcaaagaaacaaaacacgggtcaattgtctttctgagccaggcatagtggcgcacgcctttaatcccagcacccaggaggcagaggcaggtggatgtctgtgtgtttgaggccaacctggtctacattataagttccagaacagttaggactacacacagaaaccctggctcaaataaacatccttttggattctcatagcaaaataaaaaggtttcaaagtccatctttatcaaaatttttaaaaagaagaaaacttagaaataagtttaacagtcaaaatccatgaccttagctgaaaagaaagaaaagaacttgtgcacatggataaagacatctgttcacacaattaacttactatcaataggatggcaactctcttcacgttgctttctatgcacacccccagtgacttttgtggaaattgacaagtttattctaaaaacataaaaacgataaagatgtaggtgttatcatttatggaatcattgcaacatgtcttccttaactcatgaactcaggtgaaggttctgtttgaggagactgtggaggctaaggaaacttccagagaggggacctcgctaaaggacgtaggttgctagaagtggaagcttgcagggtctcttgtctctggccccttcctgccttctgctccctgcttcctttctcccaccacttcctgtcgactacacggtgaagaatctgctctaccacaaacactctgatagtctcaagaatatgggagcaagcaaatgtggactgagacccctgaggtcatgattcaaataaattcttctgcctttgagttgtctatgtttgttcaacctattgagtgagtgtagacgcagccatagaagacacatgaacagggctgagcactggctcagtggataaaggctggctgcataaacataaagatgagcttgactcttaagaactcatgtacagctggatgcagaagaacacccatctgtaatcccagggcttctgtggggagatgggaagtagagtcagaattcccaaagcgtatggccagctaccttggtgaattcaacaaaaaccaaccaagagaccgtgtctaagacaagacctgaggttgtcccctggcctctacaatgcacatacatacactaaatgttttaaagaataaacattacttttaaaatgcatgaacaaaaggaccaagatgcctttcaataaagctttaggtatttaaaggaaaaaaaaaaaaaggcagcaagtcacatatgactgatctctactgtcaaataacaacacaaggacgaacagctcagtagaaccaggcaaagacgtgagcagatccgacccatgaggggctccacacacttactacaagagttagttatttacaaagtagtaaagctaagaactggagaggatatgggaccagaacaaccacatgtatgtgtccaggaagaaagactgtgaatggagagactagtctgaaaagaaaaaggcttcttacacagttcagcatacactcgccacacgacccagtcactccacttttacatctttacctaaaagaacgaaaattacacatccaaaaatgattttatatatatatacacacacacacattgatatttgtaacaactcaaatggcagttgtgatcgtgtgtatatgctcagcccagggagtggcactattaggtgtggccctgttggagtagggttatcaatgtagatatgagctataagaccctcatcctagctctctggaagacagtattctgctagtaacctaaagatgaagatgtagaactctcagctcctccagcaccatgcctgcctggatgccaccaagttcctgccttgatgataatggactgaacctctgaacctgtaagccagccccaatcaaatgttgtccttatgagagttgccttggtcatggtgtctgttcacagcaataaaaccctaagatgctaagacagaagtaaaacaaggggtggcatatattcactgagggtgcagtgctcaggtattggaagcatattgatgtgaacaactcccaaatggaaggaacttgacacacaggtgtgtaccacaataccagatggtgccagaatcaaatccaagttgcattagtagaagtcacatctgttgagctagagatgcagccaatcggtagagtacttgcttggcaggcatgaagctgggttcagatgcccagcacggtgtaaaccaggcatgacgggacaagacagtaacctagccgaagaatccggagcgcatgatcatcctcggtcacatgagcttgacagcggcctttctctgaaaacaaaaaatcagctccataggagaatgagggcacttacacagctaccaaaatgtcccgcaaccaaatcaggacccagtggttcacgcctgcagtcccagcacacagaaggtgcaggtggaaaaattccaagcttatggcctgttgtttttaacaaaatctcaaacattcgattttaccaatgaagaccgaggagccaggtgctggggtaaaagcctgcaagcacagagaggtagaaaaagcacccagctgaccttcctccttagacatcccaaaacaaagcattccacctccgcattgtctcaaaatcccctcaaaccaagcgcccctcccttctacttcctgtgtgtctctctatccatcctcccgacttcctcttactctctatggtttcttccggtcattggttcctctatggttcatttcctgtcaacttgttgcttgctccgcctcttgacttatgattgactttatttaatcctgtttaaaataagcagaaaattcttggattaaaggtgtgtgctagggatgcgcctcaaaactaaaaacaggtttttttcggaaaattacacaatctgggattcacactgtgatcaaataccctgcagcgatggccaatattggctgcataatgagataatgagatggagtagataatgagatggagtagcagttagtgggggtttggggtggtcctatcattgccttgaaagggatagtggttatatgaaccatatgtagttgccaaaagtctcattgaatgtttcaaattctaaaacagtaaaacccagaaaatcccaggggctagagagatggctcagagtttaaatgtgaatattgctcttacaaaggaccttagttcaattcccagcacccatgttgagtggctcacaagcaactataatccagttccagggagtccaatgtctggccttcccaggcacctgtactcacctgcacacacatacacatagttaaaaataaagtaattcttaaaaaaaaataggaaatcctcatattctgatatgcatagagctgtcaggcacactattaaaagtaaacaatggatcagtgtgtagtgtgctgcctttcgtttgaaaggggttgaaatgtggtatgatttatgtgtttacagatgggtaacacacagatctatgctcgcgtatatgtcatcccatagccattacatactgcaaacaaaacacaagtcatagccacaaaggatttgaactttttttccttcccttctgtgtatttaaatttatttagtggaactagtcagtcctccacagtccttgctcttgaactaaacaggcagagtcttctctggttgctcttaggtactgaatgttttgtattctccagtgtggctactcatttgggcagtcctcttcggtactgagtggggcagtatgcagcctcattctgctgaggcccccactgctttgacatggtcagtagaacccaacgatgtagacccagacccagcacgtggagcacatctggacctcagaaagccgtcacagacaaatgccaaagactagaggatgaaaagaaaaaacaaacaaacaaaacaatagccttaatgaagttatcaaggtcaattcacagtgatgttgcctcaccagctaagttcgctggtgggattttacagaaaggacatgtcatcttacagtgatgccttcccctaaacccagactggcagtctagttatgagagaacagcagggagagtctacaagtagagagggagtttgcaaaccacccatcgagaatcttcagagatggcaaagttaagagaaacaagaagttgttacagaccaaaaaggattgtgacaaccagatgtgacctgatatcctgagttagatccccgaacagagaaaggacactggtggaatatcagaggcaaaataaaagctgtagtttccataactgcatactgccaaggctgaaccctcccaaatatgctgtgggcatgtaaagtattagcatcggggaacacaggcagaggatacacaggactctctgttccatttctaaggcttttctgaagctctaaaatgattccaaaattaaacatttatctttcaaaatgctcttctcatcaacttccaaccttttcctgcctttgatgtggatgttggcattaagaaaaggctcgctcattctcccaccgctttcctttgttttggcaagcttggcatagtgaaacctagcccttttttttttttttaagtataatttctgttatcttgaggtcaattgcaaaattccatttggatttcctatcacatttccataggctttcaaatatatctaaaataaggtgcatgaaactaaaaacagtagttgtctgtggacaaatgtgctcagcggctgcacacaagaaagatttagtccattggaccctctagaattaatcatgtgatatcctaccccttcaaaacttcaactttaattttctgtcaaatcactacctggtgactcaagaactctttttctaatattgtgaccacccgaggaaggttctcccagccatccatgctggacttcagtaggagcttcagaaccatctgctctctcatccccctgctccttctttatacatttcacaaaatggcggctgtctggtttccaacaatccatgagatgatccaacgcttcatagcctaggagtcttaccccattgtttggggcccagagggtcatgggagaccctatgaaggtatctgtggttcttgaagattctttaaaattgatattgctatgtgtattacattttagagaggatcccagaaaagattagctttcacccaaactcaagatccaagtcaaacaagcttggcttcactttctgaagaggatagaagagaatctttactgtcattagtatgacttctggttgacccagtccatccccccaactattccttaaagaaatgtcattattggggttagcaaagggttcagggagtaaagtgcttgctgctctagcatgaggatatgagttcaaatccccagcacccacataaaggctagccacaggggtgtgcacgtattacccagagctgggagacaaggacccaacactcactgaccagccagccaagacgattggtgagcgccaggtttcatgaagacctgtctcaagacggtggaatgagagtgggagacaactaagactgtcttctgacctacacacacatgtgcacacagaagcacatgcacatgtaagcatatacacaatcatgtacatacaacacacacacacagagagagagagagagagagagattgctagtgtttgggcttctgtgagttcccttaatcagtttctcaccacatgtacatgtgtatcaggcaatcgctgtaggaaacagtgatttttttttttttttggctgcctatctttctaactcgtgctttgcaagaaagctgctaaacctttctctcttttttttttttactatttaagttgtgtgttcgtgtgtgtgtgtgtgtgtgtgtgtgtgtgtgtgtgtgtgtgtgtgtgtgtgttcaagcatgcagaagtaggtcagatgctataccacatatgtggaggtcagggaatggcatcctgattgtctttagagccaagtaagcgtctttacctgctgaaccatgtcattggtcataaagttctttttataaatactgagcttatggtttgaggatgttggaattttgaatataaacattttgaagagaaatgatgaatcactttaccatggattctgccttttcttcccagcaagccctttcccttatttaaccggtgcatccctcagacacccgagtgctattccttgtttgcatcagtcttgataaatgatgcggacgctctccatcggattctaagtggaataatggcgggaagagacaccatcctcggcctgtgtgtcttcacattcggtaactctccgttaattttatttagcaactgtgtatggaatggtgaatttcccagcactcaagtacatagtgtaatgaaattcaacagctttgacttaaatacagagcctgtcgatttcctttctagatctgtcctaaggttcaaggatagacagggaactggaagagtggaagaccagttgactctcagccaggcagctgcactggggagagctgagttaatatattggcctggtcttttgttagctatgcataagagagaggcgaataaaacactgtcactttatacaaagtgctagcatccagggaccagacacgggttctgctagcccatgtgccttcatttgtcccttagaccagaaggctgttgagtgggaaaaggtaggaacttgtgttctgatagtgtcagatacaatgcccagggtgccctggcagagacctactgacggagctgagactctgacccaggtctgattctaaatcctgtgttagtatccactgtacagaagcatctataagcagcccccttgttttatttggaagaattagtgttcatagtctcagatattcagaaaaaccacaatgctaaaagcccaactgttagaaaataaaatgcaataccttatatacccagtttatttaataattataacttcagttgtgatggatgatggtggtgcgtgcctttaatcccaagacttggaaggcagaagcaggcagatttctgagttcgagaccagcctggtctacagtgcaagttttaggacatccagagctgcacagagaaacctcatcccaaggggatgggggatatttttgtaagtttgattgtttttcattgtcagggcattattcattgagattttacaaaagtatctaagagcattgagagttagaaccatacacagcctagcacaaaagacaaaagactaaattttaaaagttaatttggacttgtaggaaaaatatgatttccgggtactgtggaataattcatttacttattcatctttagctatttaaaatttccaagagtgctagcctttcagaatctacttccaaagtaaacttgtgtcactggcctagtgccctgagtatagtttgccggaatacttggctgttgagtaaacctgtcagctgtcacttctctgggcttggtcccatttgatgctcagcacccttcctccccaggcccccttccaccctggctcaccttgggcttcatgttctgtgcttactttccagccctgtctctggccatgttgttcgccttccggttcatctcgacccttctgatccacattatcatctccttggtcattttgggattgctgtgtaagtatttccactctttctaagtaaatgggacatctttccattaagtatagaatgcaaaggatgtttggttggatggttggttttgttgtttaactaactacagtcatagaaggggacacagtctaggcccactctttcacatatgaggaaaaccaggcccagaaaggagagtgggagtcgattctgcctcctaaagaaagttaatgcccaatctatccttgacgctatcccactgagtcgctcctgagaccagcctctgacggagtgaccctggagcccacaacgctgggctgcggatacagctcagtgctagtcttaccaagcatgcacaggacctgatgctcaatccccagggatgcaaacaaacaaacaacaaaacaaaacaaaaaatgtgttttactgatactcctatacactgtagggaagaattccagctggccatggtgaggcacccttgtagcttcactacttggcaggcagaggcaagtctatgaatatccatgagttcaaggccagcctggtctacatagcaagttccaaaggcagccaggactatagagaccttgtctcaaaacaaacaaagaatgaaacaaataaaaaaaaaaagtttggtgtggggagatagaatgaagaaattcaaactttcttcctttttttaaaaatttcattttgaaggatttattctgtgctacacttgccccttgggcctgtgagaacccatggttgtcacacaaaggctcaggtcagtctgcagggcaagccagggaaggagcaaacagcaggggagcctggtatatgcctctttccttaccaatcaacggattgtgaatatccccaggagctttggggaaagaatgtctgagagatagaaaccctatttttcaactggtttaggacattttaatttcaaatgaccaacatgactgcaatggtataatgcccttaaatagtcagttctgttctcaggcagccacacagagccctgagttcctgtattagtcacctttccatttctgtgacaagataccttgcaaatcaacttaaagaaaatttgtttggactcacaggttcagcgacttcaatccatattccccgggcccccttgtttctgagtgtataataatattctcatggttgaagcatgtgatagtctaaatctgattgcctcatggccaccaaaaaaaaaaccagaaagttagggtcccagatggctcccaagagcacatctccagtgacccactttcttcaagtagatcctatctcctaaagtttcttcagcctcccagtaatgccaaccagctggggaatctagccttcaacacatgagcttctaggggtcatttcagttctaaatcataacaagctctgtactggagaatggccattgtgactaggctctatcacccaccttcccgttcgtgatcagtagaaagctatgacctccctagagttacaatagtgatggtttctggtcatggctttccataatccagagtgtttgcagcatcagtgggactctgataacctgattctcatgggccgtgtaaaggacccacctctgtgagtataaagccaacctccagcccctggccccaggggctgtcaccagcagaccttatgtgaacactttaaagtttcgagtaaatgctgctccatcattctatttggtgccaccccttcctgatcacgctcagactcatcctgttggctaggtccctgtgtctgcccaagaccagtaagtagctaccccaggctggacagagcctctgcaggctaacctggcttggcacagatcacctagagataagtgccaggctaccaagcttttgaggctataggatccactgtttgggcactgttactgggtcaactataagtggctggacttacagtggttgtatttgtgtgtgtgtgtgtgtgtgtgtgtgtgtgtgtgtgtgtgtgtgtgtgtgtgtagaagaggtaatctcaggacatatgccatgcctgctgttgctttattttctagtcgtctgcggtgtcttatggtggctgtattatgactacaccaacgacctcagtacagaactggacacagaaaaggagaatatgaattgtatgctagcctttgccatcatctctacagtcgtgacagtaagcgttccaaagcaaccctagggaggactatttcccgagagagctgaggtcaaaggattagtggtggataaggagagagttaggggttggggggaggggggtgacagacacaaaccaagaagcttgaccaggaagtgaatggcagagaaggctaagcaattcgtgggtgaagggcagtggattccttaacctggagacttaaactgtttctatgcagagaggggaaacctagtcgagatggcatagcaagtagattttagatgtactcattgtccttttacgtcacgttctcttatctattcgtaacccatctctgagtgtgtgatgcggaggagggaaaatacaagatgtctcttttacccttaaagagcctcagtctcaccttctcctactcttggctggctctttaggagggtgtcaggcctccttcactatgatgactgtgggatctcacacagggacccgatcatagttggggcttagttcatgattaggaatgtagcagttcaggtgtaacagaagcagtgactatccacagggagggctacttgatgagacactggttacagggttgctttccagccccgcccctttgcagaggggttcactctgacctctttctcaccaggtccttctcctggccttgatttttaccctcaggaagaggataaaattgacagttgagcttctccacgtcacaaacaaagccatcagcagctgtcctttcctgctgttccagccactgtggacgtgtgccatcctcattttcttctgggtcctctgggtggctgtgctgctgagcctgggcactgctggtaagtggcactattttaggactgtcagccgattcctgtgagcacgtgacctcttgtgcaaccagaggcatctggaggtgacggtgagggagccaggacatctgtcttgggggaactcttttgtattggctttggagaagctgggtttcatgagtaaataaattcagtcaggcttgaacacttaggcaaagctgtaaagctgataggaagacttctgtcaaatgttgtcaagtctggggctagagcatataatttagtaggtagagaccttccctagcaggtatgaaagcctgggaccaatcccagtgccttatcaacagggtgaaatgtcacatgcttataaccctagcattcctgaagcaaaggcaggaaaattagaaagtttcaaggtcatccttgactacctaggaagtttgagccagtcttggctacataagaccctgtctcaaaacaaagaaacaacaacaacaagtcttcaggtttaaaccttttccaaggtgatttgctagctcctagcatcacagatgacagaatccagggaagactctgcaagggaggtattttcagctaagcgagtcaacagttaaaacaagtatatgaggaagttaggattgctttgactttgaaaaagcaacagtgtagcctccgttctgcctgctgtatcccatggctgcttctccaccctggtctttctcagaatccttccctgctttcccacaccaagatgtggaccaggcattcagagcttctggcctgatttgatttggggtaggacaaagtagatgggtgggtagatggatggatgaatgggtggatggatggatggatggacaggtggacagattgggcatagctacagagacatgcattttgtcatgctccccaataggatattcacactctatgtcagtgtcaaagggccatctgaaaccaagcagagagcttatgtcctggcacgtcactctgctgttgccttcgatgatgatgaggttctgccttgaagaagaaatgtagcggcctgggagtcagtgcagtttaagggggttgccttgcaaccacaaggacctgagtttgctcaccagaaccggactgggaaggcagagacaatcagatctgagactggctggctggtggatagcctggcctacgagtcaagtcctactggtcaagttccagcccaatgaattagatgatgcctgaagagtgacacccgaggctgtctctggtctctacgtgtgcttgcatatatgtggacctgcataaatatgtcacacacaccacaccacagcacagcacacgtcagctggaagaaacaacttgctcagtgatgacgactttcctttagctttttagctttagctttaagcccattcatccttgcagagtagtaacagtgtgtgggcaagcggttggtctgtgaaccatgcctccggggagatcatcctgaaaattcggtgactccgctctttgatttggtgatggcccaattcacaccctgtggcaaggacgagcaccaagttgcgtttacgagcctgttaccggacaggtaagagcaagagtggatgttacgcaataggccggtgcgattccctaatgtgggatcaagcatgtcttcccccttacttcctccattcagtgaggcaaaatacacactcctgagcaactctatagcacagaccacaggctcgtgtcccaggacaacttcagtatagtggattctttcagaacttgcctcctcctctgccaaagttgagtggccctttggaattaagacgctcacaggctccttggaaagcccttggagacacacttgtccagcttccaggatgtggtagaagcaggctcttctgcttgggggatctctgaaggcctccagtgaatgcccagcaactgcccagagagtctttgtggtgccggctctatgtgctctacttggtcaagcagacagactgtaatcatcagggtgaactttgtgtagaaagaagagaaagctgaaagaaggaaggtaaagtagccaagattgcagtgccttcaggtcccacaacctctgctctttctcgtcacttcatagttggaagagccgcctgggctccaaccactgtgtctcacacttcagcctttaggaaagcgacaggaaggaagatgagtatccttcctcagaagacatgagctgtactactacctacccccaatggccagagccaagggacatggtaacacctactgctaaggaggatgggaaatgtagtttccatttggcccgccatgcacagctaaaaacttacagggtctattacccagaggagtgggaagtctttattacaagggcacttgagagcctttctcgagctcagtgtagtctcagtgctatcagaagacagagcagtagccgtggcgcacaaaggggagaaacaaacaaactcttgcctctacctacctcacttcctgaacaaagtacccaccctgctgtgcaagtggatagggtggaaattgccaagatatcagaatacactgaaggagccaaaccaggctccgtgcaagtgaggagaggacccggtctcagagaagaaggaaaagacccaatcctgagagttgagaatgacgtcatggaattacagccccagtgctaacttggaattgagctcctagctagacaccccatgacattctcctgcgtgcgcccaaacaagagcgccaccagcctcagccaacaaggccccagagcgaaggcaggaaggcaggaggtcattcttcggttgaaagcagcccttttccccctcagccaccgaatggtgtcagaacatgatcgttttctgttagggcaagggctcagttggcatcgacgaggagagcctaggggaaagaagcgaaaactgagcgtctagaaccgaatgtaggtctccaagtaagctgatctttggcttcacagtagagcaggtaccacaaagagctaccacctgtcctccctgctagagcccaggactccctcctgccacctgaccctcctgtctgcacactcaagggctgcccaagaacacagagtcccccattgttccccaaggcctcttcatccaggatcagtggcttcgagccaagcaggccagcaactgcatcgattttttttgactctaggaagatgccccagctgtgcctctgagaagggtgaactacttccacatcttgggaaaggatgcttgccagaggatgtaggtgaacagtgcacagtgcctccttatgtcatttaatgtcctctcaggcaatgacatgaggacagagtttctctgtgacctacactaaagttgtaaatgttagggggtatcctcagtaggtaaatatttgtgagctttctctgggaataacagttgaataagttaataatttaatgtgggggactggggctcagtggtttagaacactagctgctcttccagaggtcctgaattcaattcccagaaactacacggtgactcataaccatctataatgggaactgatgccctcttctggtgtgtctgaagacaattacagtgtgctcatatacataaaataagtaaatagatcttttaaaaatatttaagtgaaaaatatagtgacttttggcaggtcatgctttctcacgtaagccatttctccagtgacttagttcttctgttaactagtttgcaaagacgtggggtttttttggagtcttctcagcaaaacattcctaacagtggtgacttcctgcctactaattcttatccaacaaaataaagaggcctgaggtggtctatatctgtcactcccccactggggaagctaaaactgaagatcagaactcaaggtctaggctacaaagagagaccctgtctttaaaatccagaactcaaaataaagcaaaaagtgaacattgtagctatccagcaggcgctgtggttgaatggaaaagtggcctgatggtctgggtgacccctgatctctaaggtggtctagcagccgggatgggagaacaatagaaaaggcccagcgcaggacaggtacctccaggtcccagctctggctgaaagggacaatcacaaccgcgtacacagtgtgtttagaaggctcagacagggtttcccatcaaaggatctgggatccaggctgcttcagattccctggggaattaattctctgtgcttttccccccatgccatccatgcaatggaaaaatgatgagaggctgggctggaggagagctttgccttgcaaatgaggggccatatgttgttgatgttaggaattagcgtccagtaggaatgtctcctgctagcctcagctgtgtgtgttatttgtttccctcctctgctatgcttggtgaacttgagaacatagtatcagagaaatgtatcagcgatctagaagataacagatgattttactgagcctcctggtgggtggccgaccttgttgcaggaacagggtgtgagagagaagtcagagagacagcagtagcccttgcctttcagaagtgcaggtcatttcacctctgcagagaaaagctgtcccccatgcattgctccatgccttgctccagtgtgagccgacctagaatccactccctttcccaactcttaccccagctctccgccacaaacggtctccgaagctaaggattttttttttttgttttgagatagggtttctctgtgtcttagaacttgctctgtaaactgtccagcctcaaactcacagagatccacctgcctcagcctcccaagtgtcagaatctaaaggtatgcaccaccactgcccaaccagaagctaggcattcttagaatttgtttctagtagtctatttcttggatggttgtctacaaatcccttgggcacgtatacataagtatttcttgtacattttttttcatattctcccttcttccaacagatactcattgtctgactatcatgtgctcagctccagagatgtattttgtgtgcctactgtgtactttgggtacttgaaatattttgataagtcagtcaatagtcttttccaccaagaggggcaaatgtatcatatgtcccaaggtgctcatttctatgaaaaaaaaaaatgttgttgtcttagttaagatgtctattgctctgataacgcaccatgaccaaaagcaacttgtagtgggaaggatttatttgggctcaagcttccaggctacagtccattattaaaggaaatgaggacaggaagtcaaacacgacgagaaccgagaggcagaagctgatgcagaggctgtgggggagtgatgcttactggattgctctccatgacttactctgcctgctttcctatagcacccagggccaccgggtcaggggtgtacctcccgtggtgaggcagactctcacatatcaaccaccaatcaagaaaatgcacatttttctctcttgagattccccctctaagtcgagctcatgtgaagctgacataaaactagccctcaaagttgttatccaccagtatagaacccggaagggagggacatcttttttctttctttgtcccttggctcggtatgccatatccggtacttgactgctggacactggagacaatggaactttcctcttatttttccctaattgtcctgtaaccagggcagaggcagaagccaagctgagggtcagaaggctcgaatcagtaggacccgtgggccaggtttctggaaaagctccaagaaaatatacagaatgtgctagaaaatggagtcttttgaaattgtgtctgctcccttttggatattgtcctacccagctggcctgtcttccttaagaatctgccatctacagtgatcagtgtaccactatagactctagaaaagctttaaaacgtgcctacaacatcaaggctatatagcttgatacattttaatcagagaattaagagtgatcttagaactttatctcaaagatctttaatcgaatatgggggaattggaacaatgtctcctctccttccagaggacccaggttcaattcctagcacccagatggtgactcacaagcatctgaaattccagttcaagagatttttttttaaataccttctatgtcctccatggacaccaggcatacatatggcacacagacataaatgcagacaaagccctcatgcacataaaatcaaaattaaaaaatagaatatgtcatttaaagaatgtctatccatctctacatttatctactcgttcaacaattgctgtaagttaaaaatcctattaaaacacacggacatagtgagttagtgatggtgcctacccttggtcctagcacttggaggcaagttaagaagatctctgagggtggggccagtctaatctacaaagagttccagaacatccagggctctgcagagaaaccctgtcttgtaaaatacaaaacacacggacaatgcaggtttccttatttggaagacaaagaaaaacttatattaagtaaggtaggtaagtgaccggaatagttggtaagatgtaaggagaaaataaagcagaggacaggggcgtcaaatgcctgaggaggctggaactcagtttttaatttggcccttgggttgggttagggttaggggtgggttagggttgtattagggttaggattatggttgggttagggttagggctaaacaaatatacttgaacaaagacttgaaagcgttgtacagggccacaaagctggcttagggaaggaagaatgtcccaagtatcggaccataaagaagacagggttctggggacaggaaggaggcagatttagctagagtggtgtcattaatagagaggtgaattcatgaaggcagtcagagaagaaatggggtaaatcctggggctgtgaaatgggaaatctggagaacccagaccggacccgatgctcattttaacagcagtaatgcttagtagagaggaatggtgttgcatggctactgggtctgtgcagtgcagtgtgacatactgggttctgaggctactttagagagtgtcgtatctgatgatgtaatagatgggagagggaggtaaaggagttggcggtggctttgggttggttcacgtggtctctcactttagcagcaggaagatgtgaaggtcatgaactgagatggagcagaaagctgagtgcatttcatgagtagaaattagtttggggagttatttttaataactatatggatatttccaataagcaattatctatgagcctgaagttcagaaggaacacataaacagtatgctgggagtagataaagaaaggattgtgctttgagatagttcactgttgtgttaggatgtccagggctagctgtagtccggtagctgtgctttggaggtgtcatatcaccctggcttttggtgattgtgttcttttgaggtcctttaaccatctggatgggtttggtctctggatattcttgtcatagtagttattgggagggggatgaacctcaatggtcctggtgtggcaggtctctgatggctatccttgggctgtatagtttctgatgtgcaggtctgtatggctcaggagcctccggtccaatggaagtcgccctgggttagcaagctgctcagggcagtttggcctggcccacagtgctcagagaacagggaagatgggagggggaatgcttaactgtatggttcaggagtctcgggtctgataaaggtaggaggagggggtggtagaagaatggaggttctccctgggctagtgggctgttcagtgcagcctggcctggcttggctcagagtgctcagagagtagggaagtgggaagggaaagagaagttcacctgtatggttcaggagtctgacaaaggtggaggagaggtagagggacatttcaatgttaacgccctggaagaccagggtgtagctcagtggtagagcacttgcttagatttgctcttgaaaaaataaataaatgggctctggagatgagaagggacagcaagatgggttgaaagtgaaggccagagctagatgacaaaggtggtttctgggaaagagtagctgggcatctgagtggttcagtgtctaaggcagggatgaagatctcagcattgacttacgacagcaacttggaggtcagattgttgtagagacgtgagcataaattgacagagggtgggagggaaggaattggaggatctaatattgaccatgaatcaatctggagggatttaactatgaaagaggcagaagagaggaaagagtccagaggagattttttttttaatggagacagttagtaatggctcaggaaagggagtattttggtgggggtggaggatctagtggcagggttggccacaggctcaagggcagcttatcattttaaggactggggttaaattccggacatatcgataagtatgcctggggagttggcataaggaaaggtcttctgattgcctcatttttccttgagtaacaggaattgaggttgttggctctgaggttggaggagagattagatagccgttgtctagaagataagatgaacaaacaaacacggtcatctgtaagtccctcggactctcagaggagttatcaagggttcttttgcctcttctatttttgctcctaatagctaatgtccacccaaatgtccaagtactggactcagtgagtgttgactgtcaacactggatcattttacccatgattcatttgcagctaaccctgcatctcactcgctgttcttagccccttatccactaattacacttgctagcatataaccttagagtagcgatgtgatggagtcacagagagcgagaagtcgctattactaccctcaatcgaagagtggaaaaaacaaacaaacaaacaaaaaaccctagatttctagaaggttccatggtttgtttgtggttggtcagccgccctcgaggatcttgcctgcaccaacacagcccgtccaggagagggcagccctgcatgcataagcacgcctgccccgccctcaggctctggaacactgactatgaaggtccttctgttcccattcaagctgcagtccttgatcctttgagagatctgcttcgagcagtgtttcctcccaggtagcatttggcatcatatgaaagtattttgaattatcagaaatggggagtagaggcaaagcaaactcctaaacacccacaaaggcattaaaccatcactacatcctatgcagaaatgtctgctccaaaatgccaatgagtgccttgagaagctaaacaatcctgtcttggtgaacatctataaaccgctcagtaaaactgatagagaggcacaaataatagacagcctcaggagacggaaagatggctcctggagcgcaagcaagtgctgtgcaaacttaacaacctgtgcttggatccccagaacccacataaaagctggacgtggtagtgcacgtgtctgcaatcccagcatgccataggaaaagggaggaggagacgggcgaagctccggaagcttatgttccaactaccctggctattgcagccataaagagactatcgcaaacaaggtggtaagtcgaggaccagtacatgaaggttgacttccgactgccacatgcaagggacggcacatgtgcccacacccacgcacataagcacacccgattgccggcacgcaggggatatgtaggggagatttgatacttcaacccacagaaattagtcaaaaatagcctctgggtttggcttttttaaaagatgtcaagtctttgagggtcaagtgcatcttgatttatcacttcaagtgctccacttgctgaccgttatcaccagtgtgacaaactaggaaatgtgtaacaatggccatgcagggcagccaagaggaaagattgtcccctcttagcatccatactagctttctgtctgtctgagaaaaatgatgccccaccccactctatgtaaatattctgtacctccaaagcataatttgctgttggcactcgtcatcttacagaagaggaactgcaagcttctcaggccctgtgcacttcagatggttcagagtatgggtctcaaagcctgctggctggcctgatgtatctaaggggcatggtcaccacgagggtcatttgcttgttgctgggaacacttttctaaaacatagcagctttagaaaaacataggcagatttctgagctcacctgaaatgcgtctccttcccagccagatgagctggacagtcagtagaccactgttggcttgtctctgtaaagcaagctaccccactacttcccacagtggccatcttgcttgacagaacttagagaggaaggaatggagacaagccagcggaatctgttttgctgaacatttattatcttcagcctttccctcgctgtgtgaactctagggcgagcgtctaaaggcaaatgaacggatgaactgaaagtccacgtgtagatgcgacaagagatacaaaaacatgtttaaatcatgggcaggttgtaggtttcaccaaagaccaaagcacccatttcttccttataataaatagtttacttgaaaagctcatgggagaacatttgaaatcaagcccaggcacagagctgggagctggtttaccagtgtctgcaggattggtagatatttgtaatatctaccgatatctaaggatgctttaggtcagaggagaaaggaaagcacaccaatagtgagcattgttaaaacacccttgctgaccttaatgcagtactgtgctcctggaatacgggatagtgatcatataagaacgacagtgataatgataattgttatcacccagggaaggctacttctgtgggccaggctttatctcagaaactattcagattatatcactttatgctcaaactaccaagaaggagttagtacgcaggcaagactaagattctaagaagctagataatgcgtcctaggcttctacaagaaggttaacattgagatctgaaccaaggaaagtaggcatttcacatgtgccaagagggtttgctcttgaaacaaactataagtggaacctgtttgagtaaaggaagactctagagtctcttttattgagtctacggatttgttttgttttgttttgttttggtgaagagttctataatacagtcttaatattttgtgtgtttttgtcaatgtaacatatttggcctccatcacacaagactatgtaacagaaaatgcacagggcaaggtatttttctattactcatgaaacatcactaatgttggactcttcggcacccattttcatgccttcaaaggagaatgagttttagggtgtatgtcaactgtcttccaaattccctatagtcactgtcaatagcgttggcactatttaaattcttagtgtttggtgtatgaccttaagctctgacagctgcatttttgcatactgccaaagaccaagcgtgaagaaacatggttcactgaaccgtcttccaggatacgggaactatcggtgtaaagcatgtttgtattataaactttaggtactgcccaggtgatggaaggtggccaagtggaatataagcctctttccggcattcggtatatgtggtggtaccatttaattggcctcatctggactagcgaattcatccttgcatgccagcggatgactgtagcaggagcaatggttgcttgttatttcaacaggtgagtccactcttttatccctgaggtttgtctgggtgctttggcttgtatatgcatctctgaagatatttgccagttttttactcaatgccttaaaagagagtaacaataattaggaaaggggaaaaaaaaagcctgcatggtggcacacgcctttaatcccagcactttggaggcagaggcaggtggatttctgagttccaggacagcctggtctacaaagtgagttccaggacagccagggctacacagagaaaccctgcttcaaaaaaaaaaaaaaaagaaaagaaaaaaggactaagttaaaatttggcctatatgctcacttattggtcagcggaaatagtctcccttaaaccccaaaattctctaggctcttttgcttaaactataatgtagtttcgtgtaatgtagaaagaaattagacagcaaagtaattatattctctagaatttaaaaatacctaaaagaaaagcttgtattctcctgtaactatccattcttaaatactatggatctattttatttattttatttttattttttaattttttttggcttttttttgagacagggttctctgtgtagccctgtctattctggaactcactctgtagaccaggctggccttgaactcagaaatctgcctgcctctgcctcccaagtactgggattaaaggcatgcgccaccactgcccggcctatggatctattttaaatacactccagtaactatatcaatggttttatctttgtaaaaatcagaaggatatttacttggaaaaataatgttacaccctaaaggaactgtgaactataattcatgtccttagagttaagtgccagggaattaattacttacttcagtgtctatggcacattgcctcatgaaaataattgaggactattgttcctctactcccgccccacccccactcacctgtacctgggccgtgtgcatctcttgagtataactctcctcggattagagccagaagagcaggcccaagacaatgacagggttgcactggaagaagcagtttgctcctggcaatgctgaccctcctctggtctctcagaccaaatgagtagataaacatgagctttctggagtccaaaagccaagcagccaagattcatgccactaagcagttgcctctggatgataaagagcactgtgtgggcttttaatacagtggtaccctttgggaaccacatcattaggaactctggaggactcacagaggggctgctgcccttggttggcactgagagcctcccagaagcaggagatgggagttgcttcgtttcctataaagaagaaagatcttctccctcaggtaacacatctgtctgagagagagagagagttatcttagcataaccagaccaaagtgtttccagcaaggacttggatgtggaggcccggtggttccgggacattgatctcatccctaccttctctccacactctgtcattaaagaattgtacaggtcacgagaaatggacaagcaatgacaggcaatgagaactatcaggctttggatgctaatttaaaaaataaaataaaattcagctgaatgatgaaaactgaagacatgactaagcacactaggaaaagctagaaggtctgcttgtgagtgttggctgtgtgcagttgtgcaagagtggcaggattcaagcataaagtgtgctttaaatttggccagatggctcagcgggttaaagtgactgccacgaaaagccaagcgacctgagtttgatccccagaacccatgctagaaagagagatctcacttccagacgttgtcctctgacctccaccagggcgccccaggcctcatgtttccacatacacagcatacacacaagcactcaacaataatagatacaaatttagaaagacagattgaaaaatacagataaatacaaagcaaactgtgcttccagagatgttaaatcttcaacccctagatccttcttcttccagaaagagaagaggcctttgctctccagggctataacctagaagagggtcagaactcggagtatctggcaaagctgagttgtgggcaatactatgcactgaagcagggagagccacacctccccacagcccacagctcagttccagggtgatggcagccaagttggtctctaaaggggggaaaggtccaagaagctttctaacccaagtcaggtgccacatgatgaagctcccagagaaacagacctccagattcctatgtcagcagtggtactctggtagacaacaagcaagctctctcccacagagcatctgacttagttagggttttactgctgtgaacagacaccatgaccaagacaactcttataaagtacaacatttaattagggctagcctacaggttcagaggttcagtccattatcaccaaggtgggagcatggcagtatccaggcagatgtgggactggaggagctgagagttctacatcttcatccaaaggtggagaggagaagactgacttccaggcagctaggacgagggtattaaagcccatgcccacagtgacacactttctccaccaagaccacacctcctaatagtgtcactccctgggccaagcatattcaaaccaccacagcatccaagggtgttttgaactgtttacttgtggttactatgcatacaaagaaagtgaaagagattagaaaccaaacaaaaggaatttagggaaaacagacacaatgcaagctgcaaaggaagctagcgatggtgcaggagacacaccaataacatcaccaaagaagactaatggactcatagtctaaagtccctcccacaaaaatgagcattgtgagaatgagaaagatcctttgataatgaacaatctcaaaagtaagaatctgctgttggatgcttcaactaggaagctgaagagctcttcctgaaagttgaacaaaaaaagttgttgtttcgttggttccttgggtggttgggtgggtggaccagtgaatgggttttggtgtttgtttgtttgtttgtttgtttgtttgtttgtttgtttttgaggcagggtctcttctagcccaaccaccaaacannnnnnnnnnnnnnnnnnnnnnnnnnnnnnnnnnnnnnnnnnnnnnnnnnnnnnnnnnnnnnnnnnnnnnnnnnnnnnnnnnnnnnnnnnnnnnnnnnnnnnnnnnnnnnnnnnnnnnnnnnnnnnnnnnnnnnnnnnnnnnnnnnnnnnnnnnnnnnnnnnnnnnnnnnnnnnnnnnnnnnnnnnccagacaacagcagtgaaagtgaaagacaccagcagtgaaagtgaaagacaacagcagtgaaagtgaaagacaacagcagtgaaagaaagactgtccatactcccaggatccctgacctcaagcttcagaatcaaatctggcatcctcccaccatcgatcaagggtcaacagtcacgctcacacaaaatccccagagatttccctagcacatcctttcttggaaggatgtttctactgatagtcctgagtgagctgggcaggggaaggagcttaagaacgtgagcagtgggtagagaagaggcgggagttccggggaaggtggcagcgttgcgatcactgtaacaaaaagtcaaggctaaagcagaggaagggagagacagagatagagacagagacagacaacacacagagtgtgtgtatgcgtgtgagagagaaatagagagagaaacagagacagacacggggtgacagcacacacacacacacacacacacacacacagagagagagagagagagagagagagagagagagaggaaggaacagatgtgcttatgcttaaatacattgaaatttacactcagcccggtgtagaatgaagcccaagggaaagaaatcaaatataaaaaaatgtgttacaggtgtgaactccaggaaaacctccaagttgtacagaaaaggcaacacaattgaacactgctacttgcatcagctgggaacgacccttcctcactgcccattctatttatgtactaatgatgcgagcgtgaaacaataacaaaattagtgtcattgagtagtagtgagaaggtgagggttatgtcggggaagagggtagggaatgagacctgaatcttctgtatgggacatctattatgaaatgttaccggacagggtgtgggggggggatgaaactcgggtcacctggctttccccatgagctgtctctctagccctgtggtgtagatttgtaaccccagcattaggaaggtaccaataggcagatccttggacagtgatagaactcgagtcaaaaagcaaagtttggatggcacctaagaaacaacatcccaccctgctattccaggttgacctctgaactccacatgttcagaggaacaaggggagaaggggggggaggggaggggaggggagaagagagaggagggaagagggaggaggaagagggagatgcacagatgtccacgcctataattatgacagtttgtatttcttgtagcattggagagatgactttaagagccacctcccagcctcctcattctgtcttgcaggttttgctagagaaatacatggaacagacatggtctttgctgtggtgtgctctttgctgtggccacactgttttctccgggctatcatctttgttggaggccagctgcactgtgtagcccagactttgttcagggactagggcacagaattggctttgcatcatgttggagaatctctcaagagtactaggcttgatctaaaactattgctctcagagttctgaagtggctggggtggttgtaaaacactatgtatgcactttgacttaaaggtaccctcaatcttctgcagactcctatcaaagcaatcactaggtacccagcgtacccagtgccttaatgtcagttctcaaactatgcccaggttcagagattagttttttgtttgttttttttttttttttcagcttcaggggaaaataatcaaatcgtcttcctaaaggcagacttttctggctgtgagggagacagagcttttagctctagtaagttatgcagtgaagagaaatagcaggtagtatccctggtgactatagaaaagggtggtgacttcaaagacactcaacttagtctctcctttgcaggactgtctctagattgaaaacaggtattgagtgactcttggcttgggttcaaaggaccttttttttttaaagttccctctctcatcatgtgataacccagcttctaaacctctgtgtcctcctgcagacaagccctgcagagcttagccttgtgacttgggagggaagtcagggaccccagttcccctgtcccaaatgatttatcccactgccgtgaaacccgctcagaaatctgatacctgaacccagacttcagtacctggaggagcagccccgtttacagcagcctgtgaatcatttctttcctaggcagatgggaagcaggtgtcctcttcagcatcttgctctcgtaagcatctaaagcttataaatctcaatggaaaagtaaaccaaaggaaaaagaaagaggagacgggaaaatgtgtcagaatttcctggcctactcttccagcatcaaatcaaaatgacaaaatagattttccaccccgacccccactgctaccgccaccccccaccgccaggatctactgtagtctaggctgccttcaaattcactgtatagaagagaatgatattaaacctttaaagaaagagatttatttattattatatctaagaacactgtagctgtcttaagacagcaccagaagagggtgtcagattttattaaggatggttgtgagccaccatgtggttgctgggatttgaactcaggatctttggaagagcagtcagtgctcttacccgctgagccatctctccagcccccaatattaaacttttgatcctcctgccactacctctacctcctcctgagtgctggaattgtagataacaccaccactgggggggggggggggcgtcatacatagctggagattgaatcccaggctctgtgcatgctaggcaggtactctaccaagtgagccaccttgaaacacacagcagttgagtaggcagccgggttctaccccagtattgctgccatgtcccctttctcttcctggaggacttaagagcaaactgcagcggataccaactctggaaaccttgctgcctgtgggcctcctcctccctcagactcccaggccactgtcaaaaccctcattcctagcaacttagcagacccaggcagtggtagaggaatcttttctaaagaaagcaagcttcacttggagccctgaagttgcttctgggaaacccggcctccttttctagaatgatgtccctgggaactcagggtcgcgagaggaaggtcagcagaaggatgatgtcatctctcctttcttttcgatttcaggtttgagggagagggagggctgctcccattctggtctttcttcccctttcttgctctgagaagctgacttgcactcattcttcagagctctgtcattacaagaccagtaaatgattcacacttaaatgacctttaaggaacggagaagaaatcagctggtttaagggaactcaaagctgtgtagagctaaatggcccaactttgttgtttcttcccttcaaaaaccatagctcttggttacctctgctggcctgggtcctgatcatgtgacttagaggatggctatcatcgccaagttaatactggcagtaattacacatatccctcggttgtttaaacggtgaacacaagacagacttaatctattgcaaagaaaaataatgtcaacagacaaccagaagggcagatggaaggatcaagaactattaaagaaacacacacacccagacacacacacacacacacacagacacacacacacccagacacatacacacacacccagacagacacacacacacacacacatacacacacacacacccagacacacacacacatacacatatatataaattagctcactgatatttttttctgttttgtatttttgttttacacattttggggggcctccccaaaaagtgagttagtccaagatgtaaggtaaccttggctaccaaagaagataaagtacttcctgggccaccactttacaggttgctaacgccaatgaggatctgaaccagagaggaccttctggttacattttacacagtgagttttgaatgttcttttcctctgttcccaggaatcaaaatgaccctcctgcccgtccaatcctttcgtctctcttcgtacttttctgctaccatcaaggaactgcggtgaaagggtcatttttactcactgtgacaaggatcccaagagtcattttcatgtgtatttatagcactctgaaagagccggtaagacagccccctcaagccaacgagctaaggattggaaatttaaggtccccactcaggaactcagacctacttcccaagctctgcttttgtcctggctgaggaaggaggagttgcctgttagctgcagttctaatcaaaacgcagagcaaatgcttgaatccttatagagcaatttcagctaatgtttgtgcctccttcttgtgcttgtttgtaagtaagatacattacgaagtaggaataatagtggctctgttttgatgccaacatactccctgcctgctgtgtttccagaggatgccatgggaagtgattggtgtgagccaggagagaagtgtgtgtgtgtgtgtgtgtgtgtgtatgtgtgtgtgtgttcgagtgtgttctcaccttcacagacacttgtgcgcgtgtgtccacactcacacacacttgagagtgagaaatgaacacgctgacctacatttcagctcaaaggacagaaaactgtagggcttttgtgctcggcgttttctcctcctcgggttctatttccatgcgcatttagttatgaaagccagtggaaaccagaacaccaggaaaacagctgttctcatggcgtctctaagctgccacacaagggaggcttggactttccccaactttcctggactcacacaatgctaatccttctccgcctctgttcccaccttgggggtttgtgacctgctctgaaattcaccaacctacctgattccagccctctgggtatagttacaggaccttaataaatggggaagttttatgctggctcaccttgtttacaattaattgtgcttgtttttaagaacagaaatctaaattgccgatattttaaagtccacaatcaagatttcagcctagcatatcaattaggaataatgagttgaactgcacgctggctcccttatcttactgtgttgagcagctgactatgaaatattttcctgtggttcctattcaggcctggcctggctgcattttgaagacttaaagagacagttttacctgacccagtgcaaatctaagtaagctactagagcctttgcaaacctaaaagagaggtccttccttccttccttccttccttccttccttccttcctttcttccttccttctgtctgtccttcctaaggtttatttattttatttatgtgtatatgtgtgaacctgcttgagcatatgtgccagaataacatcagatcctctggaactaaagttacagatggttctgagccaccatgtgcattctgggagtcaaacctgggtcctctgcaagagcagtgttcttaaccactgagccatctctccagtcccagtgaagggcttcttgtagtacagaatcacattttatttttatcttaaatatactcatgtcaggtaagtattttgtacagatgtagcacacatctaaatatatattttactaatatatatttatgatgtgtatatgtactaatatattgaccactaatacatatatttaataaagcctatattcatttctttaacatgtgaattagtcattggtaatcataaatcaatgaacaactgagagattgctgtcccctactgggcaaggtatcttaagtcctttgggaaaacagcctccataaacccaaaaggaaatctgtgggagacagagatcttgctgacccagatttaaagggctgttcatcacttcccagattccccattgttcaaagcagccaaatacccacgcagtgatgtcactgagataaaatatgacctctcataggtgttttagcatccttctagctctgcactgtgtctatagcatcagcatctctcacagcctcgcccgtgatctctcctgtgttaaatagtctcatacacagttgctgccaaggtaaaatctgtccacctcaagtttcatccagttgaattaacactgggataaaaaatgtctataagactgagtaggataggtcgggcagtggtggcgcacacctttattcccagtacttgggaggcagaggcaggtggatttctgagttcgaggccagcctggtctacagagtgagttccagacagtcagagatacacagagaaaccctgtctcaacccccccactccaaaaaaaagacagagtaggctagttgagaattgttagctgttttgggtgttttgttttgttttaactctggatagtagatgagacatggcaaccaacccttgcttagctagttcattcagtttttatttttacatcttcaaaaattctatctagagacagaggcaggtggatttctgggttcaaggccagcctggtctatagattgagttccagcacagccagggctacacagagaaaccctgtttcaacaacaacaacaacaacaacaacttctatctatctatctacctacctacctctggggaaaggagctgtgggtcctgggaattcagctcaggtgtggtgttgagcgtttttgcctcctaagccagctctccagcctgggattttttctttctttctttttgttttttaacaatagaagtaaatagaacttagtgagccatcccttccccagctaattcattctcaagctacacactcaaattagatttcagaagattgattgactctgaaatttagtctgaaaacttcactataggacttaattttccccaacattaatcgtgattatttgtgtgggcacatgactagtatctataatatatgattctgatttcttgttggtgacaaataatttgcaaacttgaatttaaaaaaatcaaagtgttcaaggcatgggggcacatactcatggtctcacccccagaggctagcaagagacttgagagctcaggactggtcttgccatacaacagcacctttgtctccaaaataaaataaaataatgtagccaggcattgtggtccataactaaaatacctacatttgggaggcagaagcagaagacacaggaggagttcaaggttagccttagctacatagtaaatttaaggccagcttaggctatcagaaactccgtcctcaaaacacacacacacacacacacacacacacacacacacacacacacacactgtgaataccatttgacatttgacacacttagagacagatgaagagaaaagagaagataagaatttcttctgttgttgaataccagttaacccgtttccctttctgtggaagttaactgaacacaccaaaagcctgcataaagcttagctcacctgcagtgatagcaattagtccagttgcttgcatgagattgagacagtggggctggcaagatggctcagtgggtaagagcactgactgctcttccaaaggtcctgagttcaattcccagcaaccacatggtggctcacaaccattcataataagatctgatgtcctcttctgatgcgtctgacgtcagctacggtgtacttatgtataataataaatctttgggccggagcaagcagggactgagtgagagggactgaccggagcaagcagaggtcctaaaaattcaattcccaacaaccacatgaaggctcacaaccatctgtacagctacagtgtactcacatacataaaataaaataaatcttaaaaaaaaaaaaagagtgagagagtgagaagtgctctaggaatcccctactctaccccatcttatccggcaccctgccgcccatactgcacccaccctgcacccagtcacccgtatccccacacacatttacccatacatagacccacaaatggaagcagtcctcctctttcttacctctgcttaccctctctgtcttctctctatgtgcctggacctgactgagctcagcagcgcagtgcttggtcaagaggtgaattcagatgcagccactgtgggctttggtgtctccttaaatatctgtaccatctcaaccaggtatgtgccttccctttgtctggggggggggggtatggagtatggggagggggtagtggaggtccgagggtggcttctattgcttagatcagctcattttccagggtgggttgtgtaattatttcagcctttcagtcatgcaacgtgtcaagtccacttagtgctgctaccgtttagtcacagacaaaatgggaagaaatgcacagggctgtgtttcaataaaactttattgatagactctgaaatccgaacatcgtgtgatttctcataccgaaaaatatttatttttcttttgccttttccgctcattttaatgctgtagatgccattcttaactccagtctgaggagggcagggcaagagtctgtcagactgatcacaccccctccctaactaaggctgtggttcacagagtcccttaccttcaaagtgtaggctattacaacagcttgtcaaattctgatcaaattactttcttttttttttatatacaataaaaagggtgcacaagccttttgacatttgagcctaatgaatatctgtcacgtgagagcaaatgttggtgtctcgggagccccgattcttctgaacggggatagctgcttcccagttttttgccgttcacccgcccttccctttcaagctacaaatactctcttaaaagatctttcatattgatggaggcttaaatagatgttttatttttctgtagttcatttaggaacgtttaataacccttagtcacatttacacaaagcagtgccttttgtaaggcagggggctgttttataatttaagtgtgcacagaaatctcacttagaagagtcgtccttattgtggcccatcttgctaaacagatgctccaccagaagtgaaggggctaattaggccatctatgtttgatgctttataagtggtatttagaataccttttattatacagggaaagtgtagcattctttttttttttaagtcctgtcctatttttaaatctgagtctgggtgtacattttagaatgcatttggatctaaataccagaagccactatatataaaacacaataagataatatggcgtttttcagagaggtggggcagatagcaagtgaagccattcctagtggatacactcaaggactgaaatgccaggcctctctcctcaaagctgtgtgcacgagtctggacaccagctgatggcaaagaggttttgagatgcggtgcattaaaataagataagatatctttgggccagatccgcagtgggaatgattgcgcagggtaacaagagtaagctggccgtgctccggctctgcgttcgttcgtgagacaagcaggagtggctctcttgatattctgatcttggggtctgtgctgtaagccatggcctccactgactatcgtggcctcattgcgtcagaagtgctgggggcaggaggctgggaaagaagagctggagggggaggaatggatggaacagagagaaaagatggatgccagtgttgacaggagagaagggtttggaaggacctggtctaaatgactttctgaaagtgaagtaaaggcttaagaaggaagacagatagtaaagattagccctcatgggagagaggacacaagagaactgcagagggaaaaaccagaacagcgacatgaagaatgagtaatacagacactgccataattaacgggaaagggcagtctttcttataaggaagaaaaaggaagctctctcactagatagatagatagatagatagatagatagatagatagatagatagatagagatagagatagagtcatatatagatatatagactcccaccataaataacaaaataatccaaactggagcacagacccaaatcctgtcagtaaccataggtttgggcaaaggagttcttcaatatgacatggagatcttaatctaccaagaagaagaatgggcacagatgaggctgctaagctggtagagggctaacctagcacgcaagtcccgttcccagcaccacgtacaccaggcgaagtgtgtgccagtaatcccagcactgtggagatggaggtgggaggatcggggaattcaaggctagattcagctacttagaaagttcaaggccagtctgagttacacaagagcgagaagagggggcaaggggagtggggagtcggggagataatgatgattaaagtggtcgtcagcacggctgtcagcttcatctggccataacaaaggaaaatgagttcaaagtgaggaaatgaatttagattagactgcgaaatcgtctaatcccactgggctaggttattgcgggggtgggagaagcgtgggcatctctatgcctggaaatcagatacagaaacagccaaagcctgttttcttcactcggcttgaggggaaggaggctggggaggctgggagaggatcagatgcatctgtcccactcagcacccagattctcgccctgcagctccgaggtccattgctccactccactgaggttcatcactgctccctaaaagcctcatccatcttcattaagacccgggatggacaggggcagggagcagtttctgccttttgtagacagccagcctaagactgcacggtgcttcattcgtagagtgggggaatagatcgccagacctcatcatgtgtcacttacttctctctgcatcctaaataccaaatgtgtgtaaggcaactgtgtcgcctcgcacattccttgtgcaagtcgtttattcattgatgctgtgtgcaaccatttgagcctgggtaccgtaggcgaaggggaccctagggatctgagctgtgtgtgtagcagaaagaaacacatacatgagacatgcgtataacagtgagacattttttaaaaatgcagacgctcagaaaaggacgacttggtaattcaaccctctgtggctatcagcagctaataaaacagcggtaatgttggctgtaggctattgacaccgactgccaattgatccttaatggtgtagtagtatctccaacttacaggccaggagactgaggcttgaataagaccccatagtcaatgtcagaagtaggagtcatttggcctccacaaccaagatttatcaatgtgaggcttttgtagccatggtctcagaaccactgtttgagctattccccggccgctttccaatccagacaggctagcttattagggcatgggggtggggttgctaatggcagacttggagaggcaaaaggtatatagggccaccaagaagctgcaactatgtatccagcagtttcaggctagggaagcctttgctgggtggcccactccctctcctgtcctcctcaggcaagtcagtgtggtccaggcttctggttacagaggctagctcatctcagtctggatggcaacaaagcccagagactccctgctccttaccaacacccttcccccagatgaaatctaccccagggatccaggctgctaaccactgaacctgaaaacctgccttctgtgtttcttttgttgttgttgttgttttgtttttcaagacagggtttctctgtatagccctggctgtcctggaactcactctgtagaccaggctggccttgaactcagaaatccgcctgcctctgcctcccgagtgctgggattaaaggcatgcaccaccacgccccgctccttctgtgtttcttactgtccatacccaagtcgtcataagaatttccactctcccacatgcggagcatctgccccagctctgatagtggctttgtttagctcagtgccccctttaagtataaatatcctggtgggggcccacaacactaccacagatgtttctacattgatttgaaagcatgctagaatttttttttcagactttagagaaaaattacaaaatttcattagatttttattcttgtgtacaagaaaggcctttttaacccatcagtaaaaaagatcccatgattattaaaatgtgtggggtttttatgttgtgttgtgttttgttttgtttatgaaccacaagcagtgtgttactttatttccttagactttgtattctttagtctgttgtgacctctaactatctgggtggtgcctggcaactctctaagtctgggaccttaggttggcagagagttgggatggtacaaattgtgagagacatcaccggtatcgttccgttcctgtggatcatgtaaaccggcagacttcgttgagtgtttggctctaacttatttcttatttttacttcttgttgttttaagcagttttcctcttctatttttcttccttccagcagaggtgggagtgggtgtaggaagtgagctcccgggtgatgccaaaactatttgaaaactaccagtctcctgggggaatctcccagcaaatgacagctccttagttgggtcttgcagctgtctgtctctgccccttcctgctttgtgtaacctgagctggccactcaacctcagcagactgtgtgggttgaaagcgttgggttaagtaagtatcacatccatagagagcctgctggccggtgttggggtacctatctcagtgcagaggcatgcagatcccacccgactctgtcatgtgcctgtgaacccaaattaggaactgactgtttccctgtgttctaactcgacacggtctcccaccaccaccaccaccaccacctccccaaatgcttcataatccatggcaaggctgactctggaatcatgaagatctttgtgctagccatttgggatcttggggtggaaatggctctccagcatatctgagaaccaaacagagccatctctctgcatccacttcgagggtttctgccaggagtgctactgggccatgaaagacagcatatatgactgacaatggaactcaggacagaaaatggccatagtaggtagccttggaaatggacacgtacttttagaccctgtgctgtacctgtctcatttctctataggtgatcacacaggaagacaggtgtgtctccctgaggaggggacaggtgcactgaggcagactgtctgtcaggcatgcgcctcctttcctttgccatctgtctggatgcacgctaagccagtgcagggattgttgcttcccggcatttgcataaaagaaaggggaactccgccttttctgagcaacacacaggtttgtcagaaaggttcagacagtaccattcatttgagtgcagagtagagcctgctgctcctgggataggctcatctcccctccctcctcctataccactctcccccctcccgcccccgccccgcccccaccccaaccacctgcctgccaatcatttttatcagtgaatgtaaatgtaaagtctgcctgtcttccaagcttttgtagtcaacctgactttgtaaaatcttaaagcctcgtccccggcacacagtgagcgccgcctttctctccacccatgaagaacagcagtacttctgcatgtcaggttttggctcatcacaagatctccactgacacttctcccccttttccagagcagcacgtgcgtctcagggaaaggatgcaatgaacgatgggaacatctctagctaggttctgtgaatggcggaaaaaggcctaagagaaagttctcttagtcaacagtgtggccctaacagtaactgtctgtggtcatagagcatccaggtagcgtttctgtctaaggcgtaggtggctcaggcctcctgcttctcctgccggctggctcagagctatccctgagcagccagctgttgtgagcgctctagggaggtgcctcctgtgtgctcgttctggagaggaatgcacatgtgtgatcgtattgacagtttgcatgaaggctcgtatatagccagtgataatcccccgcttgcagctgtctcgtggcagatgctgttacccctgctttagatagaaaggaattaagactcctcattgtcagaggccccagattgtctggaaggaaaggagctgaatccttgtgcttcccctgtgggcgtgcagctcaggagctgctgctgggtaaggggggcctttgtgtgcctgtcccaggcgtagctcgaaccgcacctgccgtgagcacgctgcaactgtcagggcacgagagggtgaggccctagggttctgagtgggcctcagtccaccctcagtccttcgggaaagactcagggagcagctgccattaaacaacaaaaccaggagaacctgggtgacattggctctaggatttaaacgtgggcttttgccagtcctggggaactccttgagggccttcctgatttgagattctacattgagggggaaaaaatgagatttattaaatgaaggcttgcatcactatcagggagagaaggggagtgatacaggggtacccggccaagcaggcacctctgctgggaagtgactgtattctgcataaatgactctgatttcctcccaagtgtgctacccccagagacaaggatgcctgctgtgtactgtgtacttacagatgctctgctgagcactcttacttcgcctgtattgactacagcgggcctcacccatcagcccttgaggggtgccctgttattattctcttccaaccagatgatagcatttaaactctaaggccttagacaaaaggaaagtgagagttgcctcttgagctttggaagataccatgggctttccttctttcttgccgaagttcaaaactgttgagagacacaagagtggagcctgaagataccgcctcaaacaccaggtcacctggtttatgggaaaatgtatcccataaactgcttgtcaatggttcacccgacatcagagggaccgagccactctcacaggtcttacccagagagtagaagctggagatgagagtgcagtttctgtaacagcaggacactcccctccaagagagtcaggagagggctgagcaagcctggctggcctatgctcccgtcccccacacaccgactcttgaagcctgccccttccctgaggagaaatgaccgtattctccgcaaggagagtcttgaccattaaaccacaaaaccaggagaatctgagtgacattggctccaggattcaaacgtgggcttttaccagtcctggggaactccctccacaggctaggtcccccagcccttcagacatcaggagacgccttcccttctttatagcaaagtctgtaggtcgaggagttggtgcctcatccacaggtagaggtgagcagagtactttcattccttatctctatcctgtgacttcccccgccttccttactgcgctaagaggcagagggtgggtgagggtgtcccattatccactgtgagatgtgcagaactatatgcagattgacccttcacagggacaccatggaagatacccatgcccctagggcagaaccatcaggaatgtttggaatcttggagggccaggatctccccataaggataggatgagactctcagctccctgctccgagtcccctccatccctctgaagacagttgccccgtctaccagcattctctcttcctcctcttgggacctgaatccacattttcatttccccagcaatggaccagagtaaggatgcagtttgaggacctggatctgagtcaggtactgtgggactcttcatccccttagcttctgctttctcaaacacacaacaaaagtctcgatggctacctcatagacaggaaggatgattaagtaagcgaatacaccaacatttaagtgtgccatctgcctctccctacatgttccataaatgctctttgctataacaaagagaaggtacctcctgatggctaaggggctaggactctgaggacatagcggtggaaggaatgccaatgccttcagaggacgagtggaaatacaggtttgaatcctggagtagggggtcacccagatttgcctggttttgttgttcaacgggggagagggagggtttagttagttttgcttaccaagtcaccaaatacaggaagtctgtgtgtcagagagatggttaaagtgcctgtttcccagggttaggacagatgacaaaagcactcttgtaatcaatcctcttagctctgtggctggcatagagataaaacagaagccattaaagttaccatcaccaattcacggctgagtgtgtgagctcccggttgagctctgaggtaattggaactcctgagttcttgaggttattcatctaatcctctcagttgagggacatcagtgcccatggagggggcagggggtgttcacctaagctgttcttctcatccccagtcccaggcactaccactgcagtcatcactcattgggagagcagagttgttcagggtagcgctttcgcttctcacaacccaaagcaggctgatatttcccccaactccaggtccagcacttacatccaaacctgagaccaggacaggagtatgactgtgcctgccgatagagaaaatgagcctagccagcccatcagttccaggagaagggcttgtctgaccctgtctctactctatcaggtcttcatgtcttccattttccaggaacactggtgacatggcctagcaggggtaactaagactgcttctagatacacaagtcaccctatcaaagtgactgtcatttcttaagtatgaggtgcacttcatgactctaagtgttgtgtaaaacacaaagccactcgaaaaaccaaacacacacacacccacacacacacatgaagccaccaacttatgctcttaccttcctatcaaagcatgtcttagatatgctgggaatagcagatgggaacccttgggttttaaacattgatctatgaaaattaccatggaagtcagcaaaacccaactccctcatgaataaggacatgctgtgaccgtgctggatgcggaggatctagcagccatatcccaatctcctatatgcttccatgcagcagctttgtgcctgtgggaggtgccctcattctctgcatcagaagacagagcatcctcggtgctcatagggagggataacaaagggcgctcagaatgcaagaggaatgtcctacactccaacaatactaaagaaatgtaaagccgggcaatggtggtgcacgcctttaatcccagcacttgggaggcagaggcaggcagatttctgagtttgaggccagcctggtctacagagtgagttccaggacagctagggctatatagagaaatcctgtcttgaaaaaaaaaaagaaaaaaaagaaaagaaaagaaaagaaatgtaaaggttagagattattgctgacatctcccagatccgtttcacttgagaaatggaattaaacagctaagtagctcctaccacaaatgatttctttatactatctccacattgggtctccttgagactcctccaaagtcctttccacccctccctttcctgtctttgaggaacccactgtgggtgcatgcctcgactctccttcctcagttacctctgccctagacatggagaaggaagtggtttgtcctgggctagagaacacacgtctaagaagaacagatgagagagaaggtgagttgtagtgactaaggaataaaagccgtgatctggctgtcaggaatcctgcgatcccacgaggcccccaccacctgagcctcatcttcgagcggttttcacaggagtgaatcaaagaccaaaactcagcgctgtgaggaacactgcaccatgcctgacttgagttccagttttgctggatttctaggaaggtgaatcactattttgggggcttttatgcaaggtttcaggtgttcccaggcatcagttagcacaggttgcccttgaaaaaaaaatctgtttgtcttcatgcatccttgggccctctctaggaaatggaattcttttactttgccatgacatatgtatggccttatatgcccagatttgtgaacagtaggttaccagctcttctaaaagaacacatctctgcaactccctccttcctagacaaatgaaagccctagagatggtgatagacgcctacctttgcttgttttgttaagacaaaagaaacctaaatcactggtcagatcccaccaacctctggtcccttgtcccacagcccagtggggtttccttctgcaggtggagaaagacctcaccacacatcttctgctccaaggcattcaggtcatattgggaagcttttcccttctctttccatattgcagggttaaaagctgggagaaggggggaagctagtaagagcggtagatggactctctctttgccctcatatatatataatacatacagccaatttaaccttatccccattagcttacaaagaaatcagactcagaccaaggttattttatttggccttgacaattactgagaggtaacccctaatctactcttctaactgctggtctggccacctccccaggggtataccccagataattgctgtttctcccggccatgtgctcatggcccatctaccctcatggcagcttcctcctcccctcagcagctgtggtctccaggaagtctccacaggtttttggcaggaaggagaaggagaaagaaggagagtgagaggtgagaggaggaagcaaccatgaggggaagtagccaggccagcagttaaaagagtagattagggtttacccccagtaattgtcaaagccaaataaaataatcatagtcgagtctcatgtctttgcaagtgagttgaggataatcttaagttggttgtacgacaccctcactccacacttagcacctcagtgggacgggtagagtctgagtcctgtagggagaggtgacagagactgggtaactaacacgaatgcgcctggcagagacagcaggcagcccttccactcagagactcatctctctagagcaaggattctcaactttcccaatgctgtagcccttgaatacagttcatgttgcagggaccccccaaccacaaaattattttcaccaccacttcataactataatgttgctactgttgtgaatagtaatgtgaatatctgagtttttctgatggtcttaggtgatctcctgggaaagggtcgttcaacttcccatttgagggttgagacccacaggttgagaacctctgctctagccatggggaaacagattctctgaaaagtaggcaagggagtggtatggataaatttagtgtcattagctgtcttaagtaggtggggctaggaagtctctcaaggctttggcagttggatccagcctttgacagccgttgtggttttatctacccacttcttttgccttttacagaatgcttcagttggcataggggtggggtaaagagagtctcagtgagattgctgaggaatgagacagctgcaccacatgacttcattggggtgcatcccagtgtgaacgtagagaaggttaatcttaggatgtttgccacaccacacttctcaccataaaaggaacagcaaagaaagatccggggaggctcaaggaacaagaggcagctagtctcattgagagccctattctagcctgtatctgggagcttgacccaagcagaccttccagacatgtctgtggtctgaaggatgatcatgaggctcatatggtctcaacaccggccctgggtccatgctgcctttgtacaacaattttatttgcaaagagtggctgggaatttgtaaagcaaggaaaaataaaattaaaaaatgcactacctcaaaagagctgcccttatctaggaccgagtgtcaggagaacagcttactgagtagatctaccaggggagaaggtaccttgaaatgagaagaccagcagccaggtgttgggggttcagaaaaaaaaaaacacacacacaaacaaagatgtcatacaagtaggcatcataattgagatgctatagtactagcctaaacgaaggtacatattagctagatatgtagtcttttgcaacagaatagagaagctagaaataaattgtctcatatatggctagcaacatcagattacatcatagagagaggacgggcttctcaacaaacactcttgaggaatctgggatctgcatgcagaagagtctcacgggggtagcagtcaaacaccaactcataatgaacaatgaactgaaaccagtttggttctgaggacctttatggcagctcataactgcctgtcactccagagctctatcctcctcggtcctcttccggcagtgcacgtgtgtagagcacttagcaggccaagcacccatacacattaaagtagattaaattttaaaaaaatgatttaaaaaaaaaaaacctggaagaaaacacaggaagggtgtggaaggcattgtatttagcctgaatggctcatacgtgacacaaaaacacagacaaaaaaaaaaaaaaaagaaaggaaaggaaggattcaccttcaactcaagaactgcaaatcctaagaaacagtgcttgcagtgatccacagagccaaagacccannnnnnnnnnnnnnnnnnnnnnnnnnnnnnnnnnnnnnnnnnnnnnnnnnnnnnnnnnnnnnnnnnnnnnnnnnnnnnnnnnnnnnnnnnnnnnnnnnnnnnnnnnnnacacaccacataacttagttttttcaaatgggcaaaggatttgaaaagacatatgtccaaaaatctacacaagaaccccaaactacataatcacaatatagatgcaggggacctgggtcggacccatgcagactacctgattgtcactcccctcagagccctggttagctgattctgtaaatccatctttcttttttgttcgtttgtttgagatctgtttacttttattctatgtgtgtgttctgccagcatgcatgtctacaccgtgcatgtatctggtgttccggaagccaggagagggcatccgatctcctggaactaaatacagatgattgtaagtgagcatttgattctgggaaccagatctggagtctctgcaagagcatccagtgctcttaactgctgagccatctctccagccccaatccagccattataaaaaaatttcccacaacgttagtcaagccacagtacagagcagaacctgggttctatctgttggccctcatcctgcaagctagcagtcagctgtagccttgcctgatgcttgtcagtcctcggtgtgttcctggatgggtagacacctgtcttagaaccatctccccttaaatgtacggcactgggaacacgtccccgttcccacatctgtcctcatctcactcaggccatctcctcagttctcaggtacagattggagatgctttgtgttgtactgtggaaaattttaatcccaacccagggttcctacctagcctttgaccatttagttcccggataaaagacacacacaacctttatatttacaataagccttaaacaatacaagagctgggcagatgtctcccctctaggctattagaatctactttcatacagatagccctgagttattgcttactatgtttaatttgggcttctctgaactctagttggccagccctcagagccatgttttcttgacttctctaacacatatcagcttctcctcctcctcctcctcctctttctctcactcatggttctctcttgactccctccaccccccgccaggcccaggaaccctaaaatccacctatatcttctattggctgtgggcatctttatttaccaatcagaaataacttgaaggcaaggtcacatagtgtcgattggggtccacactcagactctctggggcaaccaggtcttggggggcctgcacttagcattacaatacacagcatgagaccaaacctcaccagtgttaagtaaaggaccaaccatctaacgtctgtgaataccatggtgtctgtggaagtggcatagtaaaacaagccccagggtaaacatcttttgtgtgtggtgtgtgtgtgtgtgtgtgtgtgtgtgtgtgcgcgcgcgccgtgtgtgtgtaaagtttcatacacgagtactatatttacatcagggctaaacattttgcacacaccgtctaaatgtaccatcttggggactctgagtattaggcagctgccagtcactataccagtgaggaaactgaggcctggaggctgaggggcatcaccaggatgagagcgacagcaggactgtgtggccatctgtatgatatcccaagcctgagttccttgtcagtgatgaggagtggggggagccaggggccagcccatcccgtcagcgtcagcgcttctaataaaccggagacctgcagccatgccggccttcccgcccccctgcacttcccatttcatattcccacagtttccttacaaaagaccaggcctcctctctgacccgctcatttcctgcactgactaggcacaggtcaaatgagatggatggctgccatcattccggacccagggaggacatcgggtgacagtaacagcctccgcagtcctgattcctggacctgcccagtcactcagagtcacatagctgcatctcggggtacaaagctttcctggatcagccaagggtcaggtacagcaagatgagcttgtctggttttggcttgtcctggatctgagggaagtggaatactctctcacagtatgcactgtgtgctccatgattacgctccgcattggccacaacctactgacagtggggtttttttttcctcagtagaatttgacacacacacacctcgggagggggacatcagaagatgtctttaaattgattatctattatttagagaggcacacagatgccacagcacaagtctagcggccaaggtgggagttggttctcccctttcatgtgtgtgccccaggaatgaagcgcaggttgccaagcctgatgggaagtgctttacctactgagccatcctgccagcccttggccttttaagcctaatgtctaccaaagaaaaacatatcagacagtcaatttcaagtttagcatgaaggaatattatttggaaggtaatctttgcctaagccatctctagttctctattcaacgaatatccccgcagacggaatagggctcaggaagggcatcttgacagagggactgcagggtttctcagagcagtgcaacaggcaggggagagagccgcagcaccgggattggagatggcagacctggggccatgctggttgaggttagaagtggcttggaggctctcatctaagaagtcctaggtgtttgtgaccctggcagagataggacaagagtggaaaccatgaagtcaagaagccagagagaaagagaactatcacaatcaacactccctaaagctaaaacacaatgctaaggaaaagaagtcttttagccctcataacagtttgtatgggactggacagatggctcagtggttaggaacactggctgctcttccagaggacccaggttggggcaccagcacacacacagtggttcacaatggtctgtagctccagttccagaaaaactgatgcctctcccaaactcctaaaattaataaacctaaaagaaatattatttaaacgcagcaatagttttcatgttggtttaagtcatgtgtgttgaaggtgtgagtgcacatgtgtgcatagcatgagaggccagaggacaaccttctgtgttcaggcactgcccacctttgtttgagacagggtctcgaagtggcgtgggacccaccaggtaggctaggctggctggacagtgagccaccaggaccaacctggctccgccttccaaaggctgtgactacaaaactcatgtgccaccacaaggttagtctgtgtgtttgtttgtttgttttgagacaaggtctcactatgtagccctggctggccctgaactcactctgtagaccaagcagccttgaactcacagagatctgcccacctctgcctctagatgctggggttaaaggcaagagttggcttgttttgtttagatttttaacttgagttctatggatctgacttagttcttcaggcctctaggacaagtacttgatccactgagcacggaaactttctagtcccagttttccatgattcattttaaaaaggggcttaggaccagggagatagcttactgggtaacactgcttgctacacacaagcctggtcctgaattccattcctggaccccacagtgggaagagaggactgacaaccaagtgatgctgtccttggacctcacacatgtgccataagatttgtgtattcacatgcacatgcgcacacacaacctagtaataagtaaaacaaaattaaagtaagttaaaaatgaatagaaaaggggttttagaaagctaatcctcacatgtgaaagtatttgtgagaaattcaaatattccttcagtgggagttgaacatcactttctttacttgacaacgtttgtactttcactgaaaaaccctgtagaaatcagttctattggctttgggctcctctgtgtgcctgcctgtcctttcatccgtgcatatttgctaaggaatgtggggaggcaaaggaggcagtggccttcaccggggctacttgagactgatcagttgtttcctttcttctctgtctctctgatgcttaaattcacccccccacccccacccccggccacagtgatgaacttggaaagaatgaggccattctaaaaattaagcctaaaagcaaataaaatttcagaaaagcaaacaagactgcattgccctgcttctactttcttggcaggagtaactctcggcctcccctcccctctcctctcctccatgtctcatccctccctcctggcaggacccctgaagaggacagaggcggccgctggcaggcttcccctctcacagtctctctggtggtggtttgcagcctggtaaacagtgaattcttgaagggactggtgaatgccagaccctggaaggctcgggcgtgtctgccgggtgccttgacttcctctccatgtgtttgtgataaaatcagagatgaaactggcttggactagttcctgcaagtttttctaggggcctcggaaggggtctggatgtgcgtggactcagctacccctgtgtgtctctgaggtctgagggtgtattagttactcaagtttgtttcaggagttctttattttgagtgaataaaatcagaactcagagaagccattccagaaataaagccggctattcatggcagggctttggggtgaatcccttcccttctctctggaggaaaactctatttacttttttgacgagtcaacagcagctccagttcacagctctgccatcaaaagatgctgcctgccggttcagttttcggggaggacagatgggtgctctcaggggatagaggataagggtcaggctgggcaagattaagttttaatttaaagatggggggtggagggaggactttctaagtgttaatatttttggagaactctctcaaaataaagagttaatctagctttttttggttacctaataacacaatgattaaaattctattaaatgggaatcatagtgcctacagtgattattttactgagctaaggccaagttatgtgatcagaagagggtgcctggtccactgtgaatcattttgtaaacacatgtgtgcatgcatgcatgcaggtgtgtgtgtgtgtgtatgagtacacacgcacacgaacacacacactcatagaggcctgagaaggacaccaggtttcctgatatatcgctctctaccaccaccaccaccccactccccaccccaaccccccgcaggacaatgccacttactgaatctggacctgtctggtagccagcaagatccagtgagcctcctgttctctgccactttctgccaccctgggatggcaaaactgtgtaaccaccctcagcttttcttatttaaatgtttgcctgcatatatgtatatgtaccacgtgcatgtctgaggcctgcagaggccagaagagagcatcagatccctgctactggagttacagagggttgtgggatggcatgtccttgccaggaaccaaactcaggtcctctgtaaggacagtaaatgctctttattattgttgttgttgttgtttaaacttttcttatagtccagttgttatccccctcctggtctgcccattcacacccctcccccacatctcccagaggatgtccccacctcacccccaccccaccagacctcctacggttaggtgtgtcttctctcaatgaggccagtaaatgctcttaaacactgagccctctctccagccccttcactccgctggttttgtgagtttggagaatttgaacccaggtcctcacactgccgtagcaagcactcttagctgctgagccatatctccaaacaaatgtgatagactttaatttgaaactttaaagccatcagatgtccttttacaaagcccaaagcagggtgcatgagaagagcaagacctggcaggggttactctgaaggctttaggaggtaagcagaaaacccaggcttcttctacaaaactgtcctgccaggtcacaaagaaagatcgcatgaaataccacactgctgtttgaaggaaatgcccaaaacatacataaatgtaaatattttcctgcagctggacctgggtgagttagaggcccaggagtaatgtaacctcagtttcatgtgagtgactcggcatggcctctagtgcttttgtgcttgggtgctctgagctaccctacaggttgggggctaagaggggccaatgaatccgcacgttcaggaagtgtctagaatgtggaacgcagtgtgtactgagtgaatgtttgtgtcactatttacttcctcatagaaggtgcacacctgcctacggaagaaaacattaaaggccacagataggaaataggaagcgcccttccggtttgtgtcaagctgttttgggacataccataggacatctgctggggggtggcgtggggttcaggagacagaacatctgggaagaatttcagttcctgaccctggcagttgtgttcagaggaaagttttcttgactttgggccagactctggtttgccactgccattcgccagtgcactcggtggctgtgtggtcacaccacattgaccctaagtgcagcagggccctgtgggcattatcgcttgtgtgggaatgtcttgcagagttctgatatgatggttttcagccataattcttggcttattcctcctagttctcaacctttctaagactgcaatcttttaatacagttccttctaacgtggtaccgacccccaaccataaaattatctttgttgctacttcataagtgtcattttgctactgttatgaattctaatgtaaatctctgatatgcagcccctgtgaaagggtcatctgacaggtcctcactgcaatgggttgagaacagattgagaaccactgcctttgagatatatatatgtttttctgtgtagccctggctgtcctggaactcactctgtagaccaggctggcctcgaactcagaaatccacctgcctctgcctcccaagtgctaggattaaaggcatgcgccaccactgcccggcacctttgttatattttaagtgattgagaaaacttggaataaaactgggtgctttaggccagggaaaacaaatgcccgctgtgatcttctcctgcccgcatttcacacacttctccttttcctttctaatgcacagcatagaaagtcaaatcttaaacccagcgacctgggctagctcagttggtagagtgcttacccatctagacagtgctagtaatcccagcattagggaggttcagataggagatcagaagttcaaagccattgtagctgtagataaatctgagaattggtacatgagaccctatctcaggttcaccctgtgagttttacatggtcatcaacttagagcggtttaaccattgctctcttttccttgctgaaaggttagccatgggggaagggggttcctcccctatgtggggagggggagttcctcctctaatcgtttccataagcaacccattgtgcttgcttcctatccttcatcacaagacactctttccacacaccgtcaacctctgtagcagctccctttgcacatggtcccggagctgtcagctcagatacgtgcacacactgtggacagtctagtgcactccatcctccagatggctgccaaggaaacaacttctactcagcttaagcgtggaccactaatactgaaacagcaggatgcctctcgggcagtgctgcgcccaccgctcattcagctagtcactaatctaggtctggatgtggcagagagggtgggatctcacggtaaaatgttattaccgtagtcactttaggaaggcatatataatttccctgtcagtgtggttttagtgttctctttcagtgggccgtgagatgttaaagaaaagataaatggttaggagcctcctggaaagtcgtggaatcgacacatgcacaaaaacgtaccgtttaacttttaatcatcttagccgaagaacaaaatctatttttgttgctcatgagtgatgaactgtgaggcagtaggtttcagggagaaaaccctccctcaaaaaaaaaaaaaaaaaaggcataaacaaaacaaaaatcaacctacccttccccacgtgactcgggatgtccactaggaatcagtagggaaagtgttgagcctgtggtgtgggcttgggttagaacttgactaaagagaggaagcaaagatggccaccacactgggcaccgggacatggtccaagacacatagctgaccacttctgagttcccatgaggataaagaacacaggtctttcccatgccccccagaatcttaaggagttgatcagggctctgggtggttggttaatgatgccatctttgaagtgctctagctacgtgagagtgatcagccttcaggtactatggccagatgctggggttctcaggcctgtatctttaaacctcccatccccatcggtaggctctctgtccctgtttggataaggaaaaggagctgagaggctggtcgctgccccgtgcccagtgtctcctcactggaagagccaggatttgagcccaaagacagctggcctacagggcctgtgcttcctggaaccactgtgcttttagattgagttttggcccaatgcaaactgatgaaatgtgaaatccagacagttggtgtttaaagaaaagagtctttgtcttactgactcatcagggggctttgggaaagtgcccttaatcttgctttccagtctttgaaagaatgagtctgcgctggggttagaattcagtccgcagaatgctgggcttgcatatgagaaggcctgaattcagttcccaacaccacataaacccccgtgtggctccccaggcccaaaaactcagcctttgagagggagatgcaaaattgaggccagttcgcattatgtgagcccttgtctcaaacaaactaaaacaaacaaaaaaccaaatctgccattctaaacacacacacacacacacacacacacacacacacacacacacacgcgcgcgcgcatgcacgctttgactcagaaatctcactttttggaaatctaatcttcaaggatctaggatcacaaaattaagacattcagtatgtattaatatcagaatattttaaatagccagtaggtgcatttcacttcttgagttcttggctaaattcaaagtgtaccttcctgcacatatgcaaagcacatgccccataaaactgagttactagaaattaaaatgttagaagccatgtaacaacaccaaatgctttcttaggggcaaaagccaaatatgtaatttaaactgtgtgagttgttttttttttttttttttttttcattcctattccgtttttttctgtctcttccttttccacaccatcctgctgttccctctagcccctgccccatttccttagagcactttcagcatacctcttccccagggtcctcagggcagagttgggtttgttatatatctccctggctctgccctgctctggggagcccacttctgccagtacagttgttgtgaggatccaccagccctggtggaatgatttttatcttgtttttgcccggaccccagatatttcaactatcttgggcacacgttaggttattttttaagtgctttcccaagtgtctggttgatttcaaattatgaatcctattttgtacagggaatgcagctctctagaaacaaccaatactatctctcaggcccaggggatcctgaagaagccctcactaactccataccagctacagccttgggtttggctcacaagtccctagggtctgctctctttttgttacccaaacacctttccctgccctccgactctattgtgtattacaaaataacttatatcgactcattttttccatgtgtgtgctgggccattcagcctgcaggattgacatgaggtcctttcccattttccgaatggtatggaaatatatttgactatgataagaaatagatcatagtccagcttgtttgttttgggtggagatactaggtcacatactttgtactgtcattctgttgccttaaaatgccacaaatcaccgtattcataactgatgccttctgttctaggatgcgtacactgcaactgccattaacgggacagacttttgtacatccgcaaaagatgcgcacacaatcatagccaagaattcaagtcatctcacgtctgttaactgctttggaaactttgtcattttcctgggaaaggtgagatgtcttgactaaataagtactaggtacctggaagtcaacaaagtagccaacaaggaggctgacttgaaagggaatcatgtttgttgctctggagtagctgccatgtctcacccctcactcagtcccacaatcctgtgaggcttcctgttttacaggtgactctaaggtttcatgtttccagggtcccacagcccctatagttgctactttaattcttgactctgatctttcccaccacgtcttctgtattcgcagcgaaacactctcagttctttcaaccattcctccttctctgacataaatgccagttttcaagcaatgcccacaagtgaacaagatcttagtcaccagctgtgacctgggcaataccatatatggtgactgtgccccattgaggattctgtgcttctgcatgcagagtctggtgcagggctgtcatagttggtgccaagcaagttaaggcaggcttggatctcacaggtgtgtgtgctcattacacagacatttaaggctcacctggccccagagatgcttcatgtgacagcagtaacagaagtacaatgtaattatgcctttcaaaacagccaaataaggaatggttgcatgcaatttgttaatctattgccttagttgaattgtgggtgatgtatttcctaattccaaaaatacttttgaatgcagtttcaaaattattattattattattagagacaaggtttctctgtgtagccctggctgtcctggaactcattctgtagactaggctggcctcaaactcagaaatccacctgcctctgcctcccaagtgctgggataaaaggcgtgcaccaccacttcccagccagtttcaaaattcttaacatatttatatttctatttcactttaaatatcgattttcttagattccccataagcatatcatgtctagtgacctttcaaaatgtatgggatgatcagtgactttaggcttctgaaggaaatagcattcaaaatcccatattcatcttcacaggcatccatgagtaatgggggccccaggtggactctgtcactcttaagaaattgggtgtatcatgccctgtaagtgtgttcttggaaatatagtaattacatgtcacaaaagcctgggagaatccaattatcttgcacactagcagagggaagtctttccactttagtgctcagagggtaaaactaatcacttaggaaattattaatccacctattcaattgcttgcagtataaaaatggggatttaaaaaaaaggaagaaatgctgggcagtggtggcgcacggcttttatcccagcacttgggatgcagaggcaggtggatctctgagtttgaggccagcctggtctgcagagttccaggatagccagggctatacagagaaactcttgtctcaaagaaataaaaacaagcacaaacaaacaaaagcaaaagagagagctagagaaagctttttaagcagctgagactcaagtggtaaagtttctgtgcatgagaccactaccacataaaagatgactgtgatgttacatgcctaattctagtgctgtgtgtgtgtgtgtgtgtgtgtgtgtgtgtgtgtgtgtgtagatggaagactctctggaggtcactggccagcctagacaaacggatggatgggcttcaggttcaatgagaccctgcctcacaaaagaaggtggagagcaatcaaagaaggcatctgaaattggcctctgatatccacacagtgcacacagccacaggattacgtataccgcacgcacgcacgcacgcacgcacacatgtacacttctaaagcgaggctccggatgacttggccatactgtggtgagatttacagataaagtacaatctctctggctctaactgggcttttttttccttcttcttccatcttttttttttttccttcttcttctatttcagcctgtcaaattctgtttaggacacacaatagcattacttataatggggggggggggcagacccttcggtaaaagagcccaccaaccctatttataaaggttttcaaccacctcctccccaggtgctagtggtgtgcttcagcattttcgggggtctgatggcgtttaactacagccgtgcgctccaggtgtgggccatccctctgctgctggttgccttttttgcctgcgtggtggctcacagtttcctatccgtgtttgaaactgcgctggatatccttttcctgtgctttgctgtggacctggaaacaaatgacggatcgtcggagaaaccgtactttatggacccagggtttttggtaagcaaacgtttcatctcctgttgtaatctctccaccgactagtgttgaagactcacgtacagggaggagacacacccagcctcctttctggtctagagggctccaaggagtttctacttccacctggggggtgggagctcagctgtcagacacggaaccatttccccacagaaactcccagtccagaggtgagaataaaatggggcgtgtaggctcttccactgcagcatacccaggaacacagcggtagctggtacgtctttgacactaacagcctgatctgttatgtctacaatgtcttcggccacttctgtctgggagagttgatatttatgtaaagtatcttgcacatgcaagcatacccacaaagctttgggtagagcacaccgctgggcagaccgctcacctctgttgccaatactaacagcccttgggccccttgctaaccaggcacaccctcagcaaagccacttgtatctggaactaccaggcagttgtttccaacagctttttgcaacacacaatacattgctcgtcctttgccttatcctccgcagacaggacacatttcaacactcctcttcggcggttctggcagggaaggggtgttaagtgacattttagtaattttctttccttttgtcgccataaaaattaagtgttaagctcttttggccttaaacattcagagcactgtcatttcggcaggtactggatttcaacacttcctatgaatgaataaatatgaatgtgctctccactcatagaaacgtaagatgtgatttctgcccacctttatctactgggatggatgcattaaagctaacctggtctactctcctcgacttgttaatttccagttagaatcctgctttgaaatctaccttactatgcacacaaacattttcaatacacttggaaaagcgctaaaaatccaatcccctcaacctgtagggagacagcctctagtaaacagatgctgcaggcacatcactggggtctttcgttcttttgtttttcagagtgttataaaacggaccaacaacttgaacaatgccaagtctcaaggacaaaaggatgctttaccaaatgaagaggggacagaactccagcccattgtgagatagggaccaagagaactttgactacctgtgacaccgagacaaagtctacagctgttttcacgtgaactagagcacggaagatgttaaaactatgtctatatgcatcaatttaaaaggcacaatattggctgggcacagggacacacatctgtaattcaaaactggaagaggctataaggctagcctgagctacatactcagatgttaaatgctagcctgaatgctacatagagacctcatataaacaaacaaacaaataaggttggctcactggataaaggtgccagttgccaacccgaggaactgaataccccaggacccacatggtaaaaggagagaatcagttcctctaagttgtcctcagagctccacatgtgaactgccccgagtgcactcactcagccccaccaccaccaccaaaaaataaataaaaatgttaacacctcacctttgtttgttcatctttttcttttctttttttttttttttaaaggaggattttgttagcagaaatctaacaaacctagattaatgctcttgtgcagggcaggcgtttctctcattcttcctagcctggacacatgctacgagaggctatcagcatgccaagttatagctcttagacttagtgagggaaggaaggtcaagagcagacacacacaggggaggctgctgaacacgaggagacccagccggctgcaagcaggcgggagtttcacacaccagcaaacattatagaaaggtgttgctcaaccaacccctgcccaaaatgagacttgtctgacagctttttttttttttttaattattttttaaacataccgaaacagaagatcttttccttttaaaagccctaagcaaatggaaactttgaacatgaggacaggagcctcgtgggcccagatgccgtgtggaactcccattctaacaggaaacacaatctgactgacttggcaggccagcacgtgagatctaatacaaggctccttccctttgctttcctaaccacttttgcaatttgacaagaaacagcctgacagctcaggaccactttagatattttttctttaatagtaccacagaattcatttagctcccagtctcctacagtgatttacagggcactcccagaagcatctaagcaagccaccacaggaggaacaagcatacatcctttctgtgggttcaacatctcttatctgtctttacaaaaccacccgaggccatcagtcagccttgacctgagacaaggtcagagggtgtgaccgagcagcttcccccgtgacagcactgccctttcccacacttagctgtgggttagcctgctctaatcaaacagcacacctcatgcctggctttaggatcatttacatgacacatgtaataactcccccttgcgtttcagagaattccaaatcgaatttcagataaacccagggcagccaagttgtagtagaacaaggaccaggtaaatcttggttgcccctttactataggcaatgggcatttttcttcttcgtttggttgttgtttctgtagctttaaaacaaggtctctgtagcccaagatcatctcaaactcagagaaatcctcctgcttcagcctccctagtgcatacccagcttagattcagtctccaatgagtgccgtattgtatgaattaaataatattagaacactttctctcagtgcccatggaacaaggcctctggtttctcaccttactctgcctatgtagaagagagccagaaaataaccagcctgtggttcatatgaatgttcaaaaaaaaatatttatttataaaaaatacaatgggataagtttatgctgagaaacgcagcaataaatacagttgaaggaaacagagcgactctacagtaatacattggcacaaatgaagtctgcaggcacaccacccaaacctgcatgtcctcggccatttctgcatgcacgcctttcgaagcgccactcgggagagacctcgtcagcttgggaaaagaatgagtacacatgtaatcacaaatgcacactgatcatgactttatttaaaacttagcagacaagactgcagaagaacatccacgtgtcagggtctaaagctgcatctcagattttagttggcaaagaccacatttagcaaatcaactttttagtcttccacatacaagccagatacgtactaaaactgtaaaaaaaggagaaaaaatagtttcctattgttcgaaaataccagtttatgtgtaagtgtaaaaaaatgcatagatagatcttcaacgaaagagctggctgtcctggagaatcgttccgccctttccatggtacagacgcgagttactggctatgcagtagggctcccttgctacagcactagaaggcagctatttagggaggaggcaggaaaaggagaaaggaatgtacataaggcatactttaaaggtacaacaagcataatagtgtttcaggaagacgagagaagaattattcaaggctagcttgggtctcactggataaaacaatggactaaatactgcgctcctgtgtgtgactctaataatcaatgccctggtcgtcgccatactggtactcccgagggtagtcgtctgggtactcgccatgatattcatcggggtattctgcctgataatcgctatcactgatttccgacccattggtgcccgtgccctggcttccgttgtgaatgacaggttctgtgggtgcggcacagtacttggggtcatatacttgccgcccaagcccatacacgctcattcctttctgggaagcaactttgttggtgcccatctgtagagaaatggtcgagttgtccactggctgtaatgtcagcttctggtcatagatgtctcttctggtgcccggtgctaacatcccagcctggtattagagcataatggtacacaaggtaagataacagataagatctatacttcttaacactgtctaaattattaaattcacacagaatgcattaacataaaaactttcaattggttctgacgtgaccctaacttactaaaatattcttataccactcatatttatgacgggattcgttggctcttgagctgctgagttgagccaggccttcttccttcaaatctctgcccactgttaagatcactatatggtgtcagacaaattaacctaccttgagtttaacttcctatatgtaatacagaagcaatacgtcagtctactaagtgagggacaaaggaaaaccaagcccagggctggcgacaagagctctgtggttaagagcacttgtctgtcttgcagaggacccaggaccagttcccagcacctaaactgtaactcagtttcagggcatccatccattcctgacttccaagggtagcaggcatatacaaggctcatatacatacacacaggcgaaatagctagacacataaaaaaaatcagataaactacatttttttacacatattgctgaattacatatgaacatggtctattaatgaccacccaggtctccaattgtaaaaaagcatccatgccttcaacaagaccaggctgagcagatctcagggaccaagtcttctcaagaggctgccacacaagatctcccccacccacagtcccacctcagacctgctcctctctccctttcacagtgggtaacccacacctcagcacccactgctgtcaagcacacacttgagaggtgagtgagtgaaaaggcaaacacgagagaccgccaagagaaccaactgcaggtgacccggagcgctccgctccacacggggaacgacagatgtcactggaaaaacaggaaagcttaccaaaactccgtcccacgatttttagatataaaatcctgatgctttcaaacaattcctggtatttcactgtttttactatttgtgtgtggggtggggaggagtggagagggcactagacaaacctaggtccagagtccagggttatgtgaatgtgaaggctgaagaacaatgttgtagagtcgccctctccttccgtcttcatgggttccagggatcaaactcaagccaccggataaccgcctttacccggcctgtccctctctcccccatcgtgtccacaccctcatctatctcaaaacctgtggtgactaattttggctttcaggtagacacacctgggaactgtagacctcaatgaaataattagctctatcagattggcctgtgcgagagtctgtggggcattttctgaagtgctaatggatgctggaggctcccaggcaggtaggcctggctgtctaagaacggtagcagagcaagcaagggaagccagcaggtgacactcctctctgcttcagctcctgcctccaggttcctgcctcggttggcctatggcatggaaacgtaagccgaacaaaccctttcctccccactactttaaaaattatttaactaccatttcatatgaattcatttctgctaccgtaatgtttcataaaaattctgattaaacagctcttaccaaacagccaaataatcttacatatccacctaaatgggcccctttaaaaacaaaaccaaaatggggcaggggagaaccaactatcctttccttggcttttggagcaggaacatatataaacatcacttttttcttctggctaggcagaaaggccagctgatcttattgccaaccaaaccattagtcacgctacactttttaggctgcagaaagggccctttgattattttgctctctcagcaaaatctactttcctgaagactaaaaataccatggaagaaataccatttgagagtccagctactcactattgggtcagcactaacttagcatacccttccgcgccctttgcttcaagtgttaaaaagaccccgcttacctggctggcccctttgttggtgcccatctgcaggctaatcgtggtctggtcaaagggtttgtccgtctgcatcttgggatcataaagatgcctccgagtcccataggctgtcatgcccgcctggctggcacatttgttggtacccatcttttaagttaaaagatcagcattagttatcagaagtcaacagcagcatacgcacaagcctacgttctgtgtttctaaggagacgtagagcacagtcagggggatgtagctcagagccggagtcacatacgaaagatctcggttcaattcccaagcaccgaacagaagtaagaaaagccatggacttataaattcctgagctaaggcatttgctcaggcaactaggtatgaactgcgccctgtgcttcggaaaagaactgtgtgaaggctaattttaaaagaaaaattccaaactctcttacatataaaaaaactcagagcacagttagctgcatgtaaacttgcagaaggagatgtactgttaaataagaagtcactgcattggcacaactatggctaactaaacgtccctggcgctcttttctctgcagcataggtaccagattaaagtgtatcctccggnnnnnnnnnnnnnnnnnnnntggaaaacaaaaacaaaaacaaataaagtgtatcctcttcagagaagccactgcaagtggaggagaccagacaacaaggcttctgactacagcgatagctgcatccaaccttgttcttgttgtcagctacaaaagtcaccctccagaactgcataatggggggctggggggggggggtaggaggagaggaggaggagcagcaacagcagcaatttatttaaaaaaaaaaaatcttgtactgtttcaagtaagttttacaactctgcgcaggctgagcccatagctatcttccactgcatgtgcagcctgtgcgctcagagttaaaacaaacgccaggcacttaagaaccagcaacattttcatggggggaaaatacatttatttcctcaactctctggccagaaccagaacaaggcagtaagaggagcatgaaatgaagcaggaataattaacttctctcccctgctgagaactataaggcccaggagcactgagagcagcctgtggaaggaggagggcccctggagcactgagagcagccctgggaaggaggagggccccaggagcactgggagcagccctgggaaggaggagggccccaggagcactgagagcagcctgtggaaggaggagggccccaggagcactgagagcagcccggggaaggaggagggccccaggagcactgagagcagcccagggaaggaggagggcccctggagcactgagagcagcctgtggaaggaggagggccccaggagcactgggagcagccctgggaaggaggagggccccaggagcactgagagcagcccggggaaggaggagggctgtttccaccactcatggttttctccttaaaaatagtttttgactctgattttctgaggcaatctcacataaatgcaggctggccttgcactccctaggtagtcagagataatcttaaagtcctgatcctccccttcctgagtactggggtcaccatgctcaggggacacttagaagtgtttcattactaaaagcaaaacccctgcactagaaaagactcacacaaatcatgtaagccccacccccaaagagaggagagggggaaatcagtgcaacattaacgcttgtgtaactgcaactagggtttgcaacaggcacctgcaaatatccttgggttttatctgcatatgtgtccctgtgtatgtctggagccacacacacacacacacagaaacccaccttttacaaacagatacacacctatttagaagttaacagtattgtataactttgtctcttaacctgtcgttcaaacactaatgtaaatttttaggctgcacgctccaacttgcaaggagttctaacttactaactgaccagtatctgggctcttctttccaatttcccaccatttatgcaatgtgtacttttaacaattaaaggcacctcagtcaagaggtcggtacgccaagtccttagcttgtgttctgatgacactctccagggagactgtacaagtcacttgaaccaagtgcttccaagcactaagaagacccagtcggcaaggctgatacagcaccacacattaccagtgtataatgactttggcacgctggtctttgtatacattgcttcccttggtcgataacatctaagaatttataaagtgcattttctttcctttttaaagataatatggttatctttataaactatttaatttcctagacaaacaacagtcaagctggatgacataactgaaatattttttaaaacagcatcattttcttacacctactatttaattttcacctgttgagacatggtctcattctgtagaccaggctggccttgaactcatatgtagcccaggatggcttccaacgccgagcagtcctcctaccttagcctactgcatgctgggattacaggtgcattgagccattgccctacaggtcttatatacacaaaaactgtgaaatccatgtatatatccaagcaatctaaattatggaacttccatgcatattttactaatgagaggcataacactttgtgtggcaatagttaatgactttctgtagatgaataataataatatatttaaaaaaaagagtatcacaccacttacctgtaaaccaattacactctggccagcctttaatttgccttcatcaaaacgtcttgtttgtttttctgcatacttaacgccaatgtcaatggttgtatggaatccttttgttttcgcctagacagaaacacaattcgccacctgagctggaacacagagattccgccaccagcattttgaagaggaaacattgaagaaatgatgtccacagacagccttgatggtgagctcatgtcataccagaggaagaaaacacacttaggtctatttcaatgataacactgtaccctctgaaatgcgagggctctaattaacctatctagcccaagctgatgtcagcagccttttcacaaagctagcaattacagaagacacaggcccctccccacccggtctcggcatccctgggagaacaatgatgtcattcatcacctgtgtgcagggaagtttctctaacccagtgaagagtgcgtacgtaccagacctgctagagccaccagcgtcgtctgaacctgggtcatgttgccattctcaaagaggtcgtttgcttcaaatatatcatggggcttcataccgtaagcctggatagctttaatgaagttgccgatattctccaactgtaaacagaaagaataagggttgagactcatcagtcttgatgattggttacaagacaccagacagaggctttttggtgaggattctctatccgatacatagtgagcacacagcttattctctaaaagggcttataaaaagaacagtcttctgaaagtacgttttgtgtgtgtgtgtgtttttcctcttttgccgttcttgctttgagacagaattctcatgaagctcaaacctatttaaaactggtcacagagccaacgaggaccttggatttctggtccccttgctcagaccctaccttccagacctggtgctattatgtaattagatgagtactacccctccctatttatgctgtgctggggatcaaatccaggacttcacgcatgctaggcaagcactctacatgggaccacaagggcaaaactggccatgtgcatatgtgtgtgtagtatgcatttatgtatggtggtgcgcgtggttaggtgtgggtgtctgcttgtgtgtgtgtgtgtgtgtgtgtgtgtgtgcgcgcgcgcgcgcgtgtgcgcacgcgcgcgcgtgtgcgcacgcgcgcttatgtgtgtactcgcatgtgtacatttgcaggctaaaggttgacatctgacatactccatttgatatttgtgtgcactgtagcttggagttactaggcctannnnnnnnnnnnnnnnnnnnnnnnnnnnnnnnnnnnnnnnnnnnnnnnnnnnnnnnnnnnnnnnnnnnnnnnnnnnnnnnnnnnnnnnnnnnnnnnnnnnnnnnnnnnnnnnnnnnnnnnnnnnnnnnnnnnnnnnnnnnnnnnnnnnnnnnnnnnnnnnnnnnnnnnnnnnnnnnnnnnnnnnnnnnnnnnnnnnnnnnnnnnnnnnnnnnnnnnnnnnnnnnnnnnnnnnnnnnnnnnnnnnnnnnnnnnnnnnnnnnnnnnnnnnnnnnnnnnnnnnnnnnnnnnnnnnnnnnnnnnnnnnnnnnnnnnnnnnnnnnnnnnnnnnnnnnnnnnnnnnnnnnnnnnnnnnnnnnnnnnnnnnnnnnnnnnnnnnnnnnnnnnnnnnnnnnnnnnnnnnnnnnnnnnnnnnnnnnnnnnnnnnnnnnnnnnnnnnnnnnnnnnnnnnnnnnnnnnnnnnnnnnnnnnnnnnnnnnnnnnnnnnnnnnnnnnnnnnnnnnnnnnnnnnnnnnnnnnnnnnnnnnnnnnnnnnnnnnnnnnnnnnnnnnnnnnnnnnnnnnnnnnnnnnnnnnnnnnnnnnnnnnnnnnnnnnnnnnnnnnnnnnnnnnnnnnnnnnnnnnnnnnnnnnnnnnnnnnnnnnnnnnnnnnnnnnnnnnnnnnnnnnnnnnnnnnnnnnnnnnnnnnnnnnnnnnnnnnnnnnnnnnnnnnnnnnnnnnnnnnnnnnnnnnnnnnnnnnnnnnnnnnnnnnnnnnnnnnnnnnnnnnnnnnnnnnnnnnnnnnnnnnnnnnnnnnnnnnnnnnnnnnnnnnnnnnnnnnnnnnnnnnnnnnnnnnnnnnnnnnnnnnnnnnnnnnnnnnnnnnnnnnnnnnnnnnnnnnnnnnnnnnnnnnnnnnnnnnnnnnnnnnnnnnnnnnnnnnnnnnnnnnnnnnnnnnnnnnnnnnnnnnnnnnnnnnnnnnnnnnnnnnnnnnnnnnnnnnnnnnnnnnnnnnnnnnnnnnnnnnnnnnnnnnnnnnnnnnnnnnnnnnnnnnnnnnnnnnnnnnnnnnnnnnnnnnnnnnnnnnnnnnnnnnnnnnnnnnnnnnnnnnnnnnnnnnnnnnnnnnnnnnnnnnnnnnnnnnnnnnnnnnnnnnnnnnnnnnnnnnnnnnnnnnnnnnnnnnnnnnnnnnnnnnnnnnnnnnnnnnnnnnnnnnnnnnnnnnnnnnnnnnnnnnnnnnnnnnnnnnnnnnnnnnnnnnnnnnnnnnnnnnnnnnnnnnnnnnnnnnnnnnnnnnnnnnnnnnnnnnnnnnnnnnnnnnnnnnnnnnnnnnnnnnnnnnnnnnnnnnnnnnnnnnnnnnnnnnnnnnnnnnnnnnnnnnnnnnnnnnnnnnnnnnnnnnnnnnnnnnnnnnnnnnnnnnnnnnnnnnnnnnnnnnnnnnnnnnnnnnnnnnnnnnnnnnnnnnnnnnnnnnnnnnnnnnnnnnnnnnnnnnnnnnnnnnnnnnnnnnnnnnnnnnnnnnnnnnnnnnnnnnnnnnnnnnnnn

SEQ ID NO: 821 - DNA, 2285 bp, Mus musculus
acttctaactccaggcgctggcaacgggcccaggcgtcgcacagtggtcaggagcacttcctgggaaccggtgctgcgcaggtgccacccccgctcccagcaggtcctcccagcctaaagccaccacggaaagggcgtgtctaggggaccagcgccctggacctctaggaggcgctgagccctgctcgccctgccgcccctcctgggccacttggcccggtcgccgcacctctgtcccgtgtgcaaggcgaccaccgccgccgccaatcccagatgccgggtaccatgcagtgcttgggcgccgagtacctggtgttcatcatgggttattcggtggtggccggggcagcaggaagactcctctttggatatgacagctttggcaacgtgtgtggcaagaagaactccccagtggaaggagcccccctctccgggcaggacatgactctaaaaaaacacgtgttctttatgaatgcctgcaatcttgaagtcaaagacaggggtcttggtcccacagccctctgtgtatccagctgtcctgagaagcagctggacactctggaagaggtccagctttttgccaacatcaacgccctgtctctggccatgttgttcgccttccggttcatctcgacccttctgatccacattatcatctccttggtcattttgggattgctgttcgtctgcggtgtcttatggtggctgtattatgactacaccaacgacctcagtacagaactggacacagaaaaggagaatatgaattgtatgctagcctttgccatcatctctacagtcgtgacagtccttctcctggccttgatttttaccctcaggaagaggataaaattgacagttgagcttctccacgtcacaaacaaagccatcagcagctgtcctttcctgctgttccagccactgtggacgtgtgccatcctcattttcttctgggtcctctgggtggctgtgctgctgagcctgggcactgctggtactgcccaggtgatggaaggtggccaagtggaatataagcctctttccggcattcggtatatgtggtggtaccatttaattggcctcatctggactagcgaattcatccttgcatgccagcggatgactgtagcaggagcaatggttgcttgttatttcaacaggaatcaaaatgaccctcctgcccgtccaatcctttcgtctctcttcgtacttttctgctaccatcaaggaactgcggtgaaagggtcatttttactcactgtgacaaggatcccaagagtcattttcatgtgtatttatagcactctgaaagagccgcaatggaccagagtaaggatgcagtttgaggacctggatctgagtcaggatgcgtacactgcaactgccattaacgggacagacttttgtacatccgcaaaagatgcgcacacaatcatagccaagaattcaagtcatctcacgtctgttaactgctttggaaactttgtcattttcctgggaaaggtgctagtggtgtgcttcagcattttcgggggtctgatggcgtttaactacagccgtgcgctccaggtgtgggccatccctctgctgctggttgccttttttgcctgcgtggtggctcacagtttcctatccgtgtttgaaactgcgctggatatccttttcctgtgctttgctgtggacctggaaacaaatgacggatcgtcggagaaaccgtactttatggacccagggtttttgagtgttataaaacggaccaacaacttgaacaatgccaagtctcaaggacaaaaggatgctttaccaaatgaagaggggacagaactccagcccattgtgagatagggaccaagagaactttgactacctgtgacaccgagacaaagtctacagctgttttcacgtgaactagagcacggaagatgttaaaactatgtctatatgcatcaatttaaaaggcacaatattggctgggcacagggacacacatctgtaattcaaaactggaagaggctataaggctagcctgagctacatactcagatgttaaatgctagcctgaatgctacatagagacctcatataaacaaacaaacaaataaggttggctcactggataaaggtgccagttgccaacccgaggaactgaataccccaggacccacatggtaaaaggagagaatcagttcctctaagttgtcctcagagctccacatgtgaactgccccgagtgcactcactcagccccaccaccaccaccaaaaaataaataaaaatgttaacac

SEQ ID NO: 822 - protein, 558 aa, Mus musculus
EALSPARPAAPPGPLGPVAAPLSRVQGDHRRRQSQMPGTMQCLGAEYLVFIMGYSVVAGAAGRLLFGYDSFGNVCGKKNSPVEGAPLSGQDMTLKKHVFFMNACNLEVKDRGLGPTALCVSSCPEKQLDTLEEVQLFANINALSLAMLFAFRFISTLLIHIIISLVILGLLFVCGVLWWLYYDYTNDLSTELDTEKENMNCMLAFAIISTVVTVLLLALIFTLRKRIKLTVELLHVTNKAISSCPFLLFQPLWTCAILIFFWVLWVAVLLSLGTAGTAQVMEGGQVEYKPLSGIRYMWWYHLIGLIWTSEFILACQRMTVAGAMVACYFNRNQNDPPARPILSSLFVLFCYHQGTAVKGSFLLTVTRIPRVIFMCIYSTLKEPQWTRVRMQFEDLDLSQDAYTATAINGTDFCTSAKDAHTIIAKNSSHLTSVNCFGNFVIFLGKVLVVCFSIFGGLMAFNYSRALQVWAIPLLLVAFFACVVAHSFLSVFETALDILFLCFAVDLETNDGSSEKPYFMDPGFLSVIKRTNNLNNAKSQGQKDALPNEEGTELQPIVR

SEQ ID NO: 823 - DNA, 94911 bp, Homo sapiens
gtcattatgccttataacttagtatataccccatgtgtactacagtttttattatgcaatgtttgatatatgcaaaagaatatattaacataaataatgtaatgtgacatatataatcttttgtaactaaaaaatattttttaaccaaactgaaagtccctcagggctaaaggagagactgtgttccaaggaacacatttaagaagggagcctggtggctatactgttcccttgcctcacctccccataagaattttcctgctggggctgggcatggtggctcacacctgtaatcccagcactttgggaggccaaggcaggtggattatctgaggtcaggagttcgagaccagcctggccaacatgacaaaaccccatctctactaaaaatacaaaaattagccagatgtggtggagcatgcctgtaatcccagctacttgggaggctgaggcaggagaaatagttgaacctgggaggcggaagttgcagtaagctgagatcgtgccattgcactccagcctgggcaacggaacgaaacttcatctcaaaaaaaaaaaaaaaaaagtattttcctgctggaatcttgctgcccccaccaagcctacccttgctccctgctcttcagaggtacaaggggaacacaagcccctctccttccagtcctttgagcacaaccaagacagggtagcattttctaaaagctgttctacaaagtgggagcaaatgagaaagatacaatcacagaaaggcaaacggcttcttggtgtggcatgctgggccctaacggctgagttagttctgccctcagaagtataccttctctccctccctccttctcccccttattttcatcctccagtgatactacatggctgggggtcccctgctgctccatgcccctagccctttagccatgctctctcttctgcctgggaagccctccccacctttctctatcttgccatttcttgttcatcttgcaccattcaactcaggccccctctcccaggaaggcttcttggaaccctgggactgggcaaagaacccgcatcagcctgcctcatcattaaccctcaactgagcttgacctcgctggagtgggcaaatattccttcttggtgttcgtgccccttgagttggcccaagtcctggcacaaagcaagtgctgagtcaatccctgttgaataaagataggctaaaattaatcaaggttcccccagagaccagatttctaatccaaagatttcaaggagaaaagaaggtcttctgaggctgaaacttcctcatcctgaaatgaccaggatccagatttaaagagctgggagtcctttgcacacacaccttgcttggtttccttccccccacctccctccctgtctcagccaagtgctccccagtgcctccttatctatccagtatatcttgggccatttctggaccaagtacaaagacccaagacctcttgcatccttcatctcatctctggcttccagtctgaggtacaagcccccatggctgacaggaaaggcaagatggggaaggatctggtccttctgagtcagtgatcctgcccgcactggagcctctgataactgactcttgtaaggtgagccccttcttagtctgggacgagaaattgctccatcagagtctaacatcatggtattttatccagagggcatcaggcccaaagcatggtgggaactcagccacaggagctgatgaggagggtaaggaagcctgggaaaagtgggatgaagggtgggaagttctggcctttcttagtgctggccccaaagtacagtgtcaataagattcacaggctgaagcttaggtcaagcttcagtctgcatctgggagacctgccccaaagaggtaatagtcagacacttgaaagcaaagcaggcaacctgagtggccctaactgcatctttgtgtgaccagattgggacagaagcaagatctcaacatcttcagagagcacctagaagttttagaaaaaggtgccaaaggcctttggaagagatgcagattagaatataagacaaacatgaaaatcatgagaaagttaggaacagatgggcaggaggggaatgtgaggtataggatgaagaaacacacagagaagaggaaaaactgttaaggccaaagtgctacagaagctccaggggcctgcatggggttggagtgaagagattgagggtgggaaactgtgagagcttggcaccttagctgagccaatagatctggagatacaatgatcctaaggctaagtaatgatgttgcctcagtgaggaatagagagggtcaggcatgagtgcccaagctgtggggggtagaggggagtaaaaaaaaaaaaggcagaaacaaaagaaacaaggtaggtatgttcaagagcaggtgcatccatacagaagtgttaagcatgtctacttcccaagtggaagctcaggaggtggcatgcattgtcatcatctgtgggagtacagtcagggtggtgggaaaaattgtagaggaaaaattataaagatagttatagaaaataaacacaaaccctcctggaaggctggggggtttgcatggcttcagtaccagatttggctgaaggcagcctaatcctctttacctttagttgatagcaaaaaagcaaacaacaagggaatgtgtggagttgaaatagcttgtttactcttgtggtcctaagaccaaactgatcaacctcaggtgcataattgctctctgctggggggtgggggggtcggcaatgttaattaccctctagtggtgtttactcaagacctttgtcatttaatctgtactaaataaatgcaaactttgccagcttatggggcaatgctccagactcagaacagagccccttagctggactgacagctgtgttagtgtatgtctctcattcgttgctgggtcagggtctgcaggtcggaccctacagtcatcgtgtgtgtctgtgtgtaaagttagaaaaataacaaaagtagagaaaatagtttaatgaacccccagcaatttaacgaagtttaatgaacttcagcaattatcaatggatagtcaatcttgtttccccatacctccaaccattctcctttgccctggattttttaaaaagcaaatcccagagagcatatcatttttggtatgtaaatctaaaagataaagactcccttattttagacttagccccagtgccatcatcagacccccaaattctttaatataaattagttaatatcatcaaacatccaatcactgcttacatttcctacagtgtcctctaaatgatctttcattttttcatttggtttaatctggatctaaacaatgtccacacattgtaattagttaaaatattggtttcctttaatctgtaggttttccacatactcttttctttcttgttatctttttgctgttgtggtggagattgttgtcaaaacacaatgtcaaaatcgattttcccattcttgattttgccggtggcatccctgagatgtcatttgacttgttcctctatttcctatatttatagcaaagttggtagtcagattccactggatttttctggcatgacaatttcacaggcagcgatacgttcttccctgggaggaggttgatggctgactgcccctcttttatgatgtttggaaaactgtgatatcctaattcttttattccttctgcttctataagccacaatatgtctattaagagaaacttccctcattgattatttgattacccttaagtattgttcgtataagagaggtagaatatgtgtttgattctttccctttaagtttttgaaatgagttggtccctagaattttctagaggcaatcaataaggatttattttcatttggtattattgagaatttatgaatatagacatattcaatgtatttcaaggatgggatatttacaagggttttagggtctggcataagatgggtttttcaaggcagggatgctgatttaattggccagtttgttatataataagttgagaactggcgagcacaatgaagggtaggaagttgaagcgagttttgaagggcacagtcatgtggtaacccagttgagtgatctacgtattatcctgatgacagctattaaccattagagcctattgctctaataggtttttaggaaattcctaaaactggatttttttaaaacaaataataaatttatctgaaatgacatcttagttcacaagtgtaataatagttctttcttccttttctttttctccagtacaatctttacttggttttggtatcaggttgatgctggcctcataaaatgaccagagcaaattttgctctatttctatttctggagcaacttgtatgttatagaaattaactgtttcttaaaagtcccttaaaagcctctagatctgagttggggtggggggagtttaggagagatatttggctgccatttcaatttaccaaacatttagtggtttattcaaattctctatttcttcttatatcaattatggcattttacatttttaggaacataaccattttatttaggtttacgtatattagggctcataacactttttaaatgttttaatatattttgttatttcctccattattctgtcttattttgagtctttcctcttttttcctgatcagtcttgccaaagtttggtcttttaatcttttccatgggactgacttctgttttattcatcttctctacttttctctgtgtcactgatttctgcccatatctttattattgcctttcttcttgtttcactgtgtatgctgttgcttcttgtgttgaatgcttagctactttatttttaaccttttgtttcctgatagatataacccatacagttccatctaactggtgttttagctgtgtcccaatttgacatgtagaatttttattaacattcaattttaaatatttcttaatttcctttatgactcaaggatgttgtctagtaagatgttttttggtttccaaatgaggtttgggtagtttttggtttctgtttgtttgtgggttttgtttgttttttgctattctgctgatatggtttgggtctgtgtctccacccaaatttcatgtcaaattgtaatccccaaattggtgggaggtgattggatcataggggctgagttctcatgaatgggttagcaccatcccctcagtgctattttcataatagtgagttattgtgggatctggtcatttaaaagtatattgcaccttccccatgtctctctcctgctccagccatgtaagacatgcctgcttccccttcgccttccaccatgaatgtaagtttcctgaggcctcccaagaagcagaagccactaaacttcctgtatagcatgcagaactgtgagccaattaaaactcttttctttataaattacccagtctcgggtatttctttatagtaatgcaagaatgaactaatacatctgctgtattatttattgtatgtgaaaaattaccacatatgtagtgacttaaaacaacatgcatttattatcttatagtttctgttggtcaggagtctgggcacaatctaactgggttctctttcttttgtaatgtcatgtaatcatgggaatgactttccatcacatttaccgtgtatttttggtgtattaggggtcttcagagaagcagaaccaataggatggatggatggatgattgatagataagatagacagactgatagatattataaagagatttattataatgaattgactctcatgggattatggaggctggcaaatccaaaatctgcaaaaccagtgttctaatttaagtccaaaggctagaagctgctgtagaacaaggaaatgtcaatgttccagttcaagtccaaagaccactaggatgctgtagacggacagccaatatcccagttctaaggccatcaggcaggaaaatcctcttactaggtgggtggagtcagccttttgttctattcaggccttcaactgattggatgaggcccacatacattagagagggaaagctgctttactcagtccaccaatttaaatgctaatctcatccagaaacacactcacagaaatacccagaataatgtttgaccaaatatctggataccctatggctgacctattcaaaataatacataaaattaaccatcataattggttgaaaggtacaggtcccacccatatctgaagaagggaactacataagggtgtaaacaccaggaggtggaaatcataggggccttaaaatctgtccaccacacatactgttattcattacttctaattttattgcactgtgaaatttattgagcctccctttaagatctaatacacagtttatgtttttactttaatgtttcacatgtacctgaaaagagaaaggacatgtattcactgtttgatggaaacgtatatgagttataaatatctaatggctcaagtttattaattaaattgtacagaccttgtatatttgctttctgtgtgtatgtgtgttgggagaggagaggaagtatctactgtctacttgatctattggatactgagaggagccagttaaaaatctccaactataattctgatttatctgtttctgcctaaatttctgttagctgctgcttaataaatattaaagctgtattgttgggcacatttatgacctcccttatgaactttctatcttaagttttattttgtcaggttttaaaattactacatgagctttctttggttcacatttgcactatatccttttcaagccttttaaccttttagtgtctgttttacacaagtttcttgtagaaaacatattgctgaatcccttgctttcattcaatttgaaagactgtttttcttaattggttagtttaagccacttacatttattgtaattgctgctctatttaggaggcagcatagaatagctctaagtatggttctaagtatgggttctagatccagaccacctgggttcaggccttggttctgccactttctagcaagttagttaatctcagtttcatcatctataaaatgaggatgatgaaagtaatagtaccttcctcataaggttattatgaggatcaaataagaaacacccagaaaagtatctggaacatattaggtacactgaaagtaaaaattattattagtaattttatttctgctatcaaatttcatatattctaattattgcactttctttttattcctttttcctctgctctcttgcctttcatttgataaaattttcttccactgctttaaaagttacatgttttattcttttttaacggtagttacccttaagacctacattcacaaatatttatccctattgatttattaaagttaacaatttttttcgtcttcctcccatatgatagtaatttaacccagtactactctaagtactctaagtagtactgggttacttatctcatccattccagaatgagatttgagcccacatgtaaatcaacacacagcttccttcattgagaaagtcttgctacgaaagtgtcagctgaatcaaagagtttgcttatgacatagctgatatgcattctggtacaagctccttatctcttagagaacaattaagttttgtgaaccaccctttgaatggcactattttagatcactgtcctatcattttggcctctcattcctgagtcccacacccctcacaatattgatattgtctataattttaggtctgaatcattataaatacactgttctttgtttttagacttttgaaaagagtttttgtaagtcaggtttaatgaaatacagtttacatacaataaaattcaccttttctagtgtacagttctacaaattttgacaaacagataccactgggtcatcagtaccattctcaagataatggaatatttccatcacttcagaaagtttctccagattcccttcacccccagcacctgacaaccattgatctattttctgccttttccagaatgtcacataaatggaatcatagagtagcttattatatctgactttttttcacttaacatgcatttgagatcatccatgtttttgcatatgtaagaagtctgttccttcttaatgcttagttgtatttcatcgtatagatgcatcacagttatgtatagccacccaccagttcctggacacttgggtggttcctggtcttttttctaacacaacaataaattcagcctaaatatttggccactctcatgctatatctattgtatcatctcctgaatttgtttctcttcttgtttgattatgtcctccaagaatgtcattcaaatgaatctttcataagaatatttttattattaatacattctcacattctaatgacaatatggcttaatagaaaataagttcaaagttatgcttttaaatacttacatatagaaacattttgcttgagataaaccttttcaatctgaaggtttttttctaccttgaaatttatctccattatatcttcaaatatttccccttctctgtttttatatttcttcctttctgttctagttttaccctagatataagctagaaaatttacaaataagctaacttgttttttaaaacattttctactgcctctggaggtttgctgaaagtgctcttccaattactaattcatcgtcagctgcatcttttagactattgcacattactaatacgtagcatcaatattcattctaattattatttttatgcttaatatgttttagtttcatattttttcctgattcatattgctaatatcataactcattttaaataaatttatcatgcttatttaaaaatcttggtccatctgctctactgatcagtttcagatggcatatgttattcagttgtggtcttttaacagtagttgcactcctccagtgtctaattctttgtcctatgaattcatgttcccctggggtttcacctactctgtctgataaacatgcatccaggaaggcccagtgagtttgcagtgggagggtggtgtgagcccagaaggaaatcgctggcaccagagaaccactgtctatcattcccagtttctcccacttacccagatctttcctccagtcaggtttctacccttagggagaagcagcacctaaaggaagcaattaacctagcaaccctaagggtggcagggggaagggtagaggcttgattgagaggaggtggggggaggtcggcctgcagttttttttgtttttcgttttttaaattcctcaccccaacagtgcttttgcgctggtctgacactacctggaaaactatgccaccagtcgcttcagtggacactaccatttcaattgcgaagtcaggcaatgattgtcctaaggcaaggtgggagagaagtcagagtaaaccacctcgagagcgccggtctcccggagtgtctgggttcgactcctgcctccacaacttactgggtctcctcgaacaagttgcatcaccaatggccgtgcctcagtttccctcctccgtagattaggaataacaatagcagtgagaacagaatccagcacacagtaaatgctgcttacctgtttgctatgtggaatacgccactacactgttgctcggccctcaggaagggtctgctgagactttctacttcctgctcagggcagaggccgaccacccgcccaaggtcgtggcggcgccggctcagctttagtcgtcaaagtgcacatcctgggagccgctgcctcgaggtggttgaggcgagagggcagggaagcgtctgagcctcttcctcccaccagagcaggaccccagctgacagcgggtgagctgggcagaaacccatgccgggaagaggcggacccagtggaccgcagcgcccgcagtcgccgggccaggcgcagaggcgaacgggaggcggcgctgcaccgtgcccgcccctccccggcccggccccggctccagccccagccccagccccagccccggccccggccccggctcgcgggcgctgcgtctccgcgtacaggaggcggcggcggctcccagtcaccggcccccgccggcgagcgcacgatgcactgcctgggcgccgagtacctggtaagcgctcgcagcctcggccctcgggggaggagccccggggaagggtcgagtcccccgccttcacgcaccttccctgccggacgcttccgcctttcccgcgcctcggggatcccgcccccgcttagtaccttggggccacctggcggggaggaacctggaccctgctccagtgctggggcggaggcgggggagacgcgggccgcggggcgcaaacttggggtcgtcctcaggtgcacctccaggtaagcacttggcggcagggggcttaacatccgctccgcgcagagcaggtgtttcaaaggctgtgtgaaagagcttcaggtggccacgtaaaaaaataatattaattttaaaaatttagaaaaagattggttactttggcccctcttcgagtagatttgggttcggtttccaggttgagtccacctgtttatcttctttttctcaactctccctttttctggaaggtttctgcagaaggagcccctaggcaaagggagtggcgaccccagatttataggaaatgcacagatacggcatggttattcctgttctttctcttttggactggtttggtaagtgtgggtgcttggtaggaaagaggccagagtgtgtgtgcacgtctggaaataactctgtcccaaatgtaaatcgtagttggtgctgcagtgagagacttctgccgttaacccacaataaacatcagtttgtactcgggagaattcttgtcctagactcgctagaaaggctgtctttttgctacaggccatgttctaaggggtgactccattaggaaatgggaattaacagtttgcaatgtgattgctatttagtaaggccaatgtgtctccttttactctccgaacttactgaacagaagttcttttagcacctgccacacccccaaatcaaatattcctcaagcttttggtgcacctttaacaaaggaaaagccagggtaagcctagaaataaactgcatttcctttagctgaacatcacacacacacgcgcgcgagagatatgttgtgtttagcagccaacactgttaaccatagctaacaaggaatgatttttcccactctaatttcgaggtatgtatgattgctggtaaactccatcaggctatgcggttataatcctgagagagtctgttggaagccgaatcttgctgcttttatacttattttagaattgtaggtaacagcagaaaacgtctcacccgacattttcaaaggccactttcacgaaatcatccatgccaggataaggcatgctatttgctgcatggtaaatgattaatttatagagcagggtaataactaccagatagtaattacctttgttgaaaagaattccatctgaataggccctaaaatatcatgtttgttctttccaagtaagaaaggcatttgttcacttatgacccgtttcacatagacaggcttggttacaggcacagtggaaggttaggtctgaaacacataatcagatgttttttgttgcttacgttggaactctcccctaggagctgggagagacagtgcacctacaataccttctgcttaacttcgcagatggttggtgtttttatctgagactgctgttgtataaatgcagggagcagctggcctgccttgtgcctggcagctttgacctcaagctgttattgtgatttaatgatctgccgtagcccctccacagcttcaacctaggacctcactaccaaactctcagcccaacagctgagaatcctggggaaaatctttgtagatgacctatcacagcctgaagaattgtgaaccagctgagaggtggcacggagctggaaactgctttaaaattacatttcatttgcaaaataagtctgaagttttaatatatccaagttctcactatggcattctgttttaagagtcagagtcctttcttagctcactggcttttagtgtcttttgcaacattttttatttgcaggtatttaaaacagagcaaggagtgttttgtttttggacttttttttctgcctctgttgttcagctttcaggtcttgtgacagatgtcctgacttggtgatggtgtgccctgagttagggctggacaaaggcttgggggaaggagctgaaattataagcagagatggttcttgcaaatgcagcaccagcctgtgtttatatttgcattaaacataaggaacaaagtctcaaagtctggactatctctgcctctacttacccctccagtatcctctcctgccctgccttttcctatcatccctcaagattccattttcctgattttgcaggcacggttgacagtgactaccttggtggccaatgtactagaccaatgtacacacctcctatatcacctgtcatatagaatcgcaattgcatgtttgaaattaggacaatgaaggtttatagtagtagtttcttggaaggccgaggcaggaagatcccttgaagccaggagttcaagaccagcctgggcaataaagcaagaccctgtgtctacaaaacataaaaaataataatcataaagtcatagttttattaggagggactcaggaatcctcagaaaccactcccacctctcccacccagaaaaactttccattcttcaccacaggctttccaaaggaaagaatgatggtaaatggaaaacatcactttgttattagattactggtgagctgggcagaagcacatgacccctttcctccctctaaatccaaacacagtccagaccttactacactccaactcgaaaggacgagacaagcatgtcaaggcacagtcagcttgccatgccagccacattggcaaacagagtcacacctactccacagcctttaggtaaagggtgagtgacacacactactagcaaaggtgacccattcattctagaatctgaccagttagacttaggaggatcttggagagtgggaaaggacagggagcctccttccccaggaggtctgcagcccgtaagtcctgcttgccttctaggctgggttcctggaggcaaggagtaggttctggtcattcctgtgtctcccagtaagaaagtctcaagaacacactgggcacttgaagaatgtttgttattttgatttctaaattagtaataaatgcagaatgtctagaaggtatttgaatttaggacaatgtacctttgcagcataaggtatcaatactatatattaatgaatagtgtattatatctgttctcctggaatgaacttgtcaatatagagtattaaatggtatcctatatattgcatacagtactgggaaacttactaagtttgcattatgggaagatacatattcaatcttggcagagagcctgtcagtatgtattaatggcacagttgtttgaactgaaatttcaaatattccacattcactatgagagtggataaaaatgatgatagattgcaagatgttcttgtccaacagaattcctgtggtcctttattttgtatgtcttaagcagttactccaaaacactatttgcagattggtgaacagtgtttcagtacatatcaactgtgttgcttctgcagaatcccttaaaagtaagaaaagaaaaacaaaaaaagtagtagaaaaaaaaaaaaccttggggaaagaattagcatagccctgaagcagttaaattaagcaagaacatcaagggaagaaaaattgaattgtcccagtaaagttagaccaaaaagaaaaatgatagactcttaaggaaaaggttaaaaagcacagaggtaagaaaatggagagaaatctgtttcagtggattagattctctctctacctaaatgtataagtagcagaggagcaggatgctgatagatgggagttgctgacactgttactgacggagcaaagcgctatgatgctggagagcttcacgttccaccaggctccgttttatatcagcatctgcaggggtgtggggcactgtgcgctcagccctttggccaggctctcatatgcccccgtttttgccaggtgtttatcatgggctactcggtggtggctggagccgcgggaagactcctctttggctatgacagctttggcaacatgtgtggcaagaagaactcccccgtggaaggggcccctctttcagggcaggacatgaccctaaaaaagtaagtatctaaataagtccccagtctgtaaggaactgtacctcaaaactttgtataaattcatcatttggagcctggaaacttttcccattcaaaactctgtcagcctatttcataaaaaggaaggctgtgtatatagtacaggtaagagtacaagttttagaatcatagtcctaagttcaaattcagcccatgctacttttcagctgtgtgatcttgggcagagtacttaacctctcaaagcctagttttcatctctctaaactagttattatacctacctcacaaggttgttttaaggattcatgagacactgcatgagctaaagtataataaacgttaattgctgctattattctccataatgaatcagaatcatgttaccaatcgtatatgtttgaaccctacatcatccacacattgtttctacgtggaaatacccgaatgccacctggaacactggggacctgtgtcccacccctgccccagctatggcactgtggtgttgcattcttccccctactcccttaccccatctcccacagggaaacagaaaggggagagaagagatgggaattccctagaggggagagaaatccctgaccatgaacttctaagatggagactgccttgtaagaatttttaagattttagctcttgcttcacatgacagaacaaaaaaatgatgttttatttttattttttatttttttgagacagactctcattctgtcacacaggctggagtgcagtggggagatctcagctcactgcaagctctgcctcccgggttcaagagattctcttgcctcagcttcccaagtagctgggactgcaggcgcccgccaccaggcctggctaatttttgtatttttagtagagacggggtttcactgtgttagccaggatggcctccatctcctgaccttgtgatctgtcacctcagcctcccaaagtgctgggattacagccgtgagccaccacacccagccaaaaacggatttttaggactcaataataaaagtagctcctagaagagaaatcctaaggatctaaataaatcctgaatataagtttggagtcaccaaatacaaatctcagactaagcctcttatcctcctgagtgttgctcctaagggggctcttgctctttctgggcatggactaattacggggcattttctcctgcactcatagagccacttacaaagaagacaggaggaggaagggcgacttagatgcccatgtgctcccatttcacattgtgttcataatgcagtgtcaacaaacagtcattcctggttgaagtgagtatacattccattattctcaaaagccaaaaggtagaagcaactcaagtgtccatcaatggttgaatggataatcaaaatgtgatatgtatattacaatgaaatattaaaaaggaaggaaattctgacacatactacaacagggatgaaccctgaggatgtcatgccaagtgaaataaaccagtcacaaaaatacaaacattgtatgattccacttacatgagatatgtaaagtagtcagattcctagaaacagaaagtaaaatggcgattgcaaagggctggaggaaaggagggtgggaacctattgtttaatgggtacagatttcagtttgggaagatgagttctgtgaatggatggtggtgatgatagcccaacaacgtgaatgtactaatgtcactgtacacttagaaagattcagatggggctggtgcagtggctcatgcctgtaatcccaacagtttggaaggccaaggcgggcagatccacagggtcaggagttcaagaccagcctggccaacatggtgaaaccctgtctctactagaaatacaaaaattagccaggtgtggtggcaggcaccagtagtcccagctactcaggaggctgatgcaggagaatcacttgaacctgggaggcagaggtggcagtgtcattgcactccagcctgggtgacagagcgagactctgtctcaaaaaaaaaaaaaaagaaagattcagatggtaaattttatgtatattttaacacaatttttaaacttcttcaaaaatatgtatatcacacacccaggaaatctgttcctcatctcctgttgcaccacctttctcccatccccaacaggagggaaaaaaaccttctgggaccccttctcaaggtctctcccataaagggcagcctacggggtcttcctctgccattcctggggtcttggagcctggataagtggtaggcaagggtttggaagctgtagctgctagcgcataacctgctgatggcaacaccagtttcattcttgtcccccctctgccctgcccctggggagctgcaggagggttctcctgagtgtcctggctctcaacctgggagaagggggaaaagacaagcctttggttcccagccttggccccctcctttccacttctcacttccctgtgttcagttattctctgaagcatatttgaacactcttgggtacaaatgtgttctccgtggagtccattgaatagtttgtgcattggcctgatctagcaatcaatggacagtttaaccaattgcttcttttcctcagattttctcaggtaactccctagtgctatcccctagacaacactaaatctggagaaataaagctttgttaatgtttttggatagtttccaagctgcacagcttcatggatgaccaccagtaggcatcataaatgttcaattatgctgaaacaattatgaaagtgtgcctgggtgatccctgcatttgatagcatgtggatattttttaaggcccacaattaagaccagtgagaagcaatgctctaacacattcttctgtttcatctatttcctagacacgtgttctttatgaattcctgcaacctggaagtcaaaggtacgcagctcaaccgcatggccctctgtgtatccaactgccctgaagagcagcttgactccctggaagaggtccagttctttgcaaacaccagtggtaggcactaaggcctggtttgttcttttccccatgatggggtaagctgtggggacctagatgagatcatttaccctgactctgctttctctggaaagctggaagttttacttccttgtgggtgcctctttttgtgtggaaaaggccgtaagcattttctcttgagcttgttcaggttattttttttctatctggatttatctgaagccctagctattccgtgtatgctccctgccactgcagggaatggtcatccacagagagagagaggagacagcccacatttaagacccaaaggcggtgtcagaaggaaggcagagagctccatgcacgtgggcacatccggtcctagagatgtacgtgcaggctgcgcgtagaattgctgacaaattggtcttttcatgagatttttggggccaatagatacttccactgagcagtgggatgtcacaagttgtaccagaagcacttgtataactaaaataccttgtactgggtccactgtttagaattttatctgtctgagaaatggtttgccagatttttaaaaattatttgcaaagccaggtttaaactatcaagcttctacaagaaattgttttcaaatatgcttcagattattttaggaccaatcatataacttttagttttgaatttggggttttgaagagaaagtaaggaagagaggccctcactagacctcagattgtatgcctattacttttgtgtttctgtcacccatagaccttgtagttgattctttctcctttctggtttggtaacatggctgtggtttccttactgactcacctggaaagaaggtataatgtctgtgtgttctgcttccagggtccttcctgtgtgtttatagtttgaattccttcaactatacccacagtccaaaagcagactcactgtgtcccaggctaccagttcctccaaggtaaaagcttccatactttttccttaactctaaacaaaagttactgggtacttggtgtgcatctgttactcttctaggcattgtgggaaggagatatcagaagagcccctgcctgcagggagcttacagtctacggaggccagcgataaaaacatggagggactatttgcagtatgcctatggacagtggattagaaatcaggctaaataaggagaaaactcagcaagcaataaaaatacacgtagtcttcaaagaacactagagctagcaagaagtaacttatgaattattactaacggggtgattttataaattagtgtgtatttttttctactccaattatttattgcaaagtagaaatcatttactttggccgggcatggtggctcacacctgcaatcccagcattttgggagactgagccaggcggatcacgaggtcaggagatggagaccatcctggccaacgtggtgaatccccatctctaaatatacaaaaatatatactatttttttgtatactaaaaatatactaaaaatacaaaaattagccgggtgtggtggtgcatgcctgtagtcccagctacttgggaggccgaggcagaagaatcacttgaacccagaaggtggaggttgcagtgagccgagatcgcgacactgcactccagcctggtgacagagcgggaatctgtctcaaaaaaaaaaagaaaatcgtttacttttggctttttatcataattagactctgttagtttttattgctctagatatcttcataagaaacagaccagatggacaaggccaagtgatcaccacacctttcttaatgaaaacagaaagcacaggtccttatcaagagtacacttggtgggctccttgcaaggtcttattcacccctgtaaattagtgtactacctggcacatggtaggcaccttacaaatatttgtagaataaagttgtaatgatggaacggtggttgcattgccatggcgaatggctcatgtttacacctttgagaaggctaaggggaaaaatacaatgagtgtttattgccaccattatgatgctgagatgtactaaaggaaaacttgtattgattttgaattgtcattcttttgaaaaatgtgagtatgtttacaatgtaggagacctctctgaaaaatccctgagaaataatgattatttaattaaaacaaagcattattccaatcctctagggtggtgtttattgaactcttgtttgggacttacagtaagaaatttattacatcccaactcctgtatgcacataccttcatatgtccttacatatataaaacaaaactagaaatctcacaaaacaacatttacccttattacatatgattcacactcttagttactactctgttgcctttttaaaaataatgtatttcatagtcttataactggttgcaagtgaagcttgaaaaatgctgaactagcaggtgctcacaaacacaaagagacttgagaaggtttaaatcacatcggaggcagaaaatagccattttgtgatattcttttctaaaataaatactccatgttgtaagtaattgaaggaggagagaactatttgctgaggagaatacccatttcatttttctataatattcttttttttgagacagagtcttgctcttgtcacccaggctggagtgcagtggtgcgatctcagctcactgcaacctccatctcccaggttcaagcaattctcctgcctcagcctcccaagtagctgggaccacaggcgcatgccaccatacccagctaatgtttttatttttagtagagatggggtttctccatgttggccaggatggtcttgatctcgtgacctcgtgatccgcctgcctcggcctcccaaagtgctgggattacaggcatgatccaccacgcctggcctataataacttatttttaaaattctggtaattgtaaatgtgtttatgatattttacattctggtaaaatgtaaggtatcataaacacatcttaatgaaacatactgaacccaatttaaaaaaaaactagaatgttttagtaataggtggaaggaaaattctctagcacttggagaggaggacttttttaagaacacagtttgtaactgtagatgtaactacggatggaattgaaagagaatggaatttttaaggttgtaatttaaccagagttggataaactctcttcttactataaatgggatggcaaccataattccacaggaagcttatatcttgatacttatgatgataatggcaaacatttattgagcttttgatacttttctaaacccttaacataatttgggcctcagaaaacgtctatattgtaggtattgttttcatccctatcttacaactgagaaaactgatgcagagaggtttaagttcatacatccagcaaatggaaaagctggcattcaaacccaagcagcgtctatgtttgagtcaagacttgattttattttgactggtgagtggccttcctagactcacatcaagctgggagaaagagtctccgtatcctgtgtcataatagcaccatttcttctcactctcaagccagccctagtccttttcaccctaaatgcaaatgtttccaatactaacttttcaagtaaagacaaaacccttgactgagtggccttttttggacagaaagagagagagaaatagcctcaagggctccattcccttttcctgcacaagcaagtgtttgtttaaggtgaaaatgatcatatttatcatggaatagcagtgccaagactgaaaagctggaaaacatgagaagggtggctatagggccaaagaacattttctaaatacctctttttgactaaactgattgtttcttcctcgtctgtcggtcatgtgaggtataacgtacccttttcgagtaatggctaaatatcaaggaatttgtggacctaggtatgagcttttaagagcagtgaaaaagcactacagaagataacaagcaaatagatcttttttcactttggtgttcaacatggtaatgtattttgagtccctcatgtattcaaaatctaaaaggcgtggatattttccccccagtaaattctagttctactctcccacataggtgcctgtgcatgtcactgcatggtttgctcagctgaattccatatacctggtgatctaaatatacaggcagcttacccaatgacttcctgcaagtttgagtggctttgctaatgggaagaagaaaagcagaagtggtgaagaaacctcaggccatggcctaaagatgcatccctgtgagccgggcatagtggctcacatctgtaatcccagcactttggaagggcgaggcgggcagatcacctgaggtcaggaccagcttggccaacaatggtgaaagcccgtctctactaaaaatacaaaaattagctgggtgtgatggcaggcgcctgtaatcccagctacttggggaggctgaggcaggagaataacttgaacctgggaggtggaggttgcagtgagccaagaccacgccattgcactccagcctgggtgacaagagcaagactccatctaaaaaaaaagatgcatccctaccccagctaatgaaatactctaaatctcgaaaggcgtagcagttacatagatgtgtatgtttatcaaagtctctaattttatgtttaagatcagtgtatttcattgtatataaatattgcctcagtaaaaataagaggaattccttacattctgaagtgtattaagttaaaaaaaaaacaaataatagaacagtgtgcagtatacttttgcataaaaagtggaaaatgtaagtataaacctataaatatatatatctaggtatatatttgcttgtataaccattattacatcaagcatgacttacaggatgtagtcagaaagcaatttaatttttgtctttctctgtctctttaaatttattcagtgggactagttttttctgcccctgaataaaaacacaggcaattcccaaggcttctctggtaacttttaggtaatacatactgagtcactttaagttgcaacagacactttcaattcaataattaaaatgttcagcccagaccaggcacagtggctcatgcctgcaatcccaacattttgggaggccagggctgtaggattgcttgaggccaggagttcaagaccagcctggacaacataacgagaccatgtctctacaaaaatttaaaaattagattggcatagtggaacatgcctttagtcctagctgaagctgagatgggaggatctcttgagcccaggggtttgaggttgtagtgagctgtgatcatgccactgcactccagccttggtgacagagcaagaccctgtctcaactttttttttttaaattaaaaaatattcagcccaatgtgataaacttctcacttgatcggaggttcaaacttctgccccctgcacgcttggcccaggagcaagtgggaaggccatagtccaggaaggaggctgtagtcagcctcccttctcctctgtttattcctgccctcctctcccagcttgctgaaacaggttttgtctaaggggctggtgcagcaaaagtgaaggaagaaaatagtagcaggaacacatttacttgtctgatactagcaccagcattctctgggcttgggagatgtcccggccagctctttccctcatgggcatgttttgggttcttcggggctctttcagctgcagtgcctttcatgtagtctaatgcatctgtgctctggctggtcatgtgagaggctttcctcagtcctgaggcattaattagctacctcagagagcagccacctccagctccttctgccaaggtccccacagccttctacagggctgtcttagacacgatcggtggcaccccatcactgggacttgtgcacatgcagcccacaactagaccccaggaagccctctgcaccctttgccctgacaaatgccctgggggctcttaactccccagctgtagctctctgctctgctgttaaagccgctcaccctccagatttcttggggtggctcagaccttaagccaggggattccctaagctctctgagttttccatgaaacccttctcatctgacttaggaaaatggggatggagtcacatgacaagtctagtaaaaaaaaaaaatttcaactcttcaaaaattactcttctaatgattctctgcacttgtcatcacctgtgcagagtagattttactatatgcaaataaaaattaaaatcaagatgtcaggatcttaggatagtgtgtagagggtgacaaattaaatgactaataaggagctgatgtgagtaactttggaaaacagctttgtgactagatactgtaagctaaagacaaaaggaactgtatacaaacactgtactccagatagtacatttgtttgtcacatagctactggttaacaattgtttttctcattttttaaaaattccctaaacaatacagtataatggttagcaattctgaaattacatactagaatcgattatagggcctagaatcagtaataccccaccatacccaatacccagatcatggtttctaatcattggtcttcaagggttctttggagaaatggcaggttctaggacttggataaggaaaataccagctacgtctggtatcatcatcctgtagcatcagaaagtaaggaagtgctcaagaaagaaaaagaatgggtcttgtcaaaaggacacagatgactcgtagtggccaaagctggaatagattgaataacacaattaagattataacccaaagaaaagaataaatgttgatgaggccatactgatatgaataaataattgaataaataaataaatggggggaagggataaatcctttttttctttttttttgaaacagtcttgccctgttgcccaggctggagtgtagtggcacgatctcagctcactgcaacctgtgcctcccgggttcaagcaattctcctgcctcagcctcccgagtagctgggattacaggcacccaccacgacacctggctagtttttgtatttttaatagagatggggtttcaccacgttggccaggctggtctcaaactcctgacctcaagtgatccactcgcctcggcctcccaaagtgctaggattacaggcatgagccactgctcccggtgaaagggataaatctttacttcttcctccaagaggtggaatttccctccctttgagagtgggctaggcttagtgactcatttccaaggatagagagggaaaagagaaaaataacaactttacaaggagaaacccggcaggtaccaccttaactaggtgatcaaggtcaacttcaccagtgttgtcatgttcctcgataggattctatgagaaaggcacttcacctctgtggcactgtcccaaaaacctgttgactgtagcctaatcatgagaaaacatgagagaaattctacaaattaagggacattttacaaaatacctgactatgaatcttcagaaatgtcaaggtcacgagaaacatggaaaaactaagaaacttgtcacaggccaggcacagtggctcacacctgtaatcccaacactttgagaggcagaggtgggaggatggcttgagctcaggagttcaagaccagtttgggcaacatagcaagactctgtctctacaaaaaacataaactgtcatgaccaaagaggagacgtgacaataaaatgccatgtgctatcctgaattagatcctggaatagaaaaaggatgttacggtgaaatccaaataaaggctgtagtttagttagtagtttagtgacaatgttaaatcttaattttcacaaatatactgtggttatgtaagacatttacattaggggaatgtgagtgaaggatacacagaggaaccctccaccatcgttacaatttttttgtaactctaaaattattcagaaatttaaagtttacttttaaaaatgctctgcttatcaacttccaactcttttatgctctcagcatggatgtgggtttaagaataatctaaccacttttctcccacctcttttttggcatgccctgaatggtggagtctggcgtctcattttggagtagaatttttattatctttgagctcagccgcaaattccatttaaacttcctatgatatttacatatgctaataaaagtctctagaatggtttgcaagaaaccaaaaatcatgggtgcctgtgaggaaatgtacttcggtagctcaaggacaaggaaaggcaatttcttgctgtttggtctcttgtactttttggaatttaagccatgtgaatgtattaccccttcaaaaatgtaattacaaaaaacaccgtttgtgttactcttctcttgaaccactatccagtgactcaggaactgtttctgtaatattgagacttctggagaaagattcttccacgtgttctatgttgtgcttcattagaagcttgggaagtcatttcttttcttcagggcaatgaaatcttttaacatttggattctcctttgtttcattcttatacattgcacaaaatgattggtgattgggttttgagcagctttttagataatttgacacttctttggttgggattatttccaccatttggggttcatggaaagaaagaagaacaggaccctgtgaaggtatcagtggcctcatgaagattcattagaatgcatattgctaggcttttttacatttcaggaagaagctaaaaaaaggtcaactttctcatctacccaaggcagttatcaactgcagcatcaatcacacatttactatccatttattgagcacccactgttcatagcaaggctctcaagcctcatatgccttcctaaacaggacggaattaagctaatagtgtcattaacacagcttctgtctcatccagttcacatccctaatagttccttacagaaatacaattcttttgttggggttggtagtttgtgtctaagaagggctaagacaggagaataaaaattgtggttcccactgggcacagtggctcatgcctgtaatcccaatactttgagacatcaaggcaggtggatcgcttgagctcatgttgcccagcctgggcaacatggtgaaactctgtctctacaaaaaatgcaaaaattagctgggcgtggtggcacatgcctgtagtctcagctactcaggaggctgaggtgggagaatagcttgagccctggaggcagaggttgcagtggcccatgatcgagccactgtactccagcgtgggtgacaaaggcagaacctgtctcaacaaaaaaaaaaaaaaaaaaaaaaagaggttccccataaataaaatgtagtatatgtacacataccacagagtagtatttagccttaaaaaaagaagagatcctgctatttgcaacaacgtggatgaaccagaggatattatgttaagtgaaataaaccaggcatgtaagggcaaatcccatacatgatcccacttgtatgtggaatctaaaaaagtcaaattcatggaaacagagaatagaattgtggttatcagggatgcaggcaggggaaatgagagatgctggtcaaaggatacaagtttctgttacgtaggatgaataaattctagatatataaagtaaagcatggtgactatagttcataatactgtattgtatatttgaaatttgatacaacagatcttcagttttctcaaaatatgataactatgggaatttatggatacattcattagcttaactgtagcaatcatttcatgaagtttatatatatcaaaatatcacattgtataccttaaatatgtgcaatttttatttttaaaaatgttgctccccaagtttaggtttttggtttctgtgggttcccataatcaacttcctattcagaacatcagctaatcgatgtagcagagcatacttgcctggctttctaaggtgtgctctgcaaatggcatgctagacgcctctctattactgtagttcttaagcttttttggttattgagaatgttaaataaacatcttttaaagataaatgttaaataaacatttttgccatctttttttctctatttttagcaagtcatttcccttatttaaccgatgtgtccctcaaacacctgagtgctactccctatttgcatctgttttgataaatgatgttgacaccctccaccgaattctaagtggaatcatgtcgggaagagatacaatccttggcctgtgtatcctcgcattaggtaattctcagttaagttaattttaatagttgtttatggaatgccaaagttcctagcattttatatgttgtacaatgaaaattagcctcttgttttaaatataaaactctgtatttttaatagatattttcagtgtttcagatttaagtgggatgggggcaatacgaatagaggagcggctggccctctggcagaaagcctcagtgggtagggttgccttgatatactgactatgttctagtgtctgctcctcactggggatgggtatataaagcagattgccaatttgtggatgggacatgaaaaatacaactgtcagggtgaccagaaaccatgtcttctggccaaacatgcctccacctgtaggtggatcagaaagcagatcagaaagctgcttggtgagcagggcaaggacatgtatgcatccatgttaaatggagtcagactgcaagggcctgctgtatcctgctcctctaagggacatacctgctttgggttgtagacaggtcaaggccttcagccttctctgggcatttctggaagcagctacccactcttgatcttttgagttcccattttctatgtttcagttggctgaaatcaagagccaactttctctttgaacaggtgaatacactctgcccctttagacagtggtaagagcctattgtctcctcgctttccagtggcagcccacaaacctcttggtagagagaaactctttggtcagacattaacatatttctaacagttaacaaattgagttttccacaatttcattactaaaaggttcctaattcctgaatgcttggggatatttaactagtcactattatgactttcagacttcttacttaggctgaaaatgacttcaattgactcaaacaagatgctttgactcccaaatactggcttggttacaatatataacaaaaaaacctcaggttattcctgatatcttatataatgacctaatgtccctgcaaggacattgtcatgtgcttattagattcataatggtattaacagctgtcgtttactgagcacttaccatgtgccaggcattgtacttattcttcactcattaaaacctcatcagaatcccagtaccactcataggagatgaaactgaggcttagagaggtttaggacttggccagtgttgcacacctaggagaagaggtggcagaactaagactcaaacccagatctgtgtggtcccaaaacccaccttactaaacataactctgatctagatgcaatcctgatttcctatgtcgaaaatagtacatacagcttatttcatggttaggatcttaaattcttcattttaaagacattattaatctttcatatttaataagagtaccttagaacatgtaaagttagaactttacataagcccagtatgaagtcaaaagatttaagtatgataattttagatggttcatttggacttgtaagaaaaaaagatttgggcatttgagaataatattgctataaaattttttttctttctttctttttttttattgagacagagtcttgctctgttgcccaggctggagtacagtgccatgatcttggctcactgccaacctctgccacccgggttcaagcgattcttgtacctcagcctcccgagtagctgggattacaggtgcccgccaccatgcctggctaatttttgtatttttagtagagatggggttttgccaggttggccaggctgttctcgaactcctgacctcaggtgatccacccgcctcggcctcccaaagtgctgggattataggcgtgaggcaccatgcccggccaaattttttttatttttgagaagaatactaggactttcagagacaggcttaccacacttgattgaatggtgcatcagagactgccccacgtataccttgttatttttatttagtgtttagtagatatcccaagatatttagagattgaatacaatcctcagccgtcactgttctggagggttttgtcatcgcagtgctaccatcatctcccctatcctttgttgctattgaggtttatgtgttttgcttaatttttcagccttgtctttggccatgatgtttaccttcagattcatcaccacccttctggttcacattttcatttcattggttattttgggattgttgtgtaagtatttctctacttgactgatttcttttcgattaaatgaaaagcctttacattaagtacagaacttaaaagttggcatttttaagctacatggagtcttaaagagtatctagccctgtcactttacaaatgagaaaacttggcctcagggaggacgatgggagttgctatgtctcacagacagtgcaaagttaatgaccaatcttttttttcttctttcttttcttttctttttctttttccttttttttttttttttttttttttgaggcaggctctcactttgttgcccaggctggagtgcaatggcgcgaacgcagctcactatagcctcaacctcctgggctcaagcgatccccctgtctcagccccccaggtagctgggattacaggcacatgccactacacccagctaatttttgtattttttgtagagacggggttttgccatgttgcccaggctggtctccaactcctgagctcaagcgatccgcccaccttggcctcccaaagtgctgggattacaggcatgagtcaccacgtccagccatatctgtagtttcttctgctgtgctatgctgcccctgagatgagctttccaataccgtgatcctgtatccataacgttaaaagagaatcccagtacccactgggagcattttaaaggatttcttctgaatgcgcacctcacccattggcacgtgggtgcccacagttgtcatgtaaaggctctgaccagccggaagacacacaggcctgcatggaagcagagtcctggagaccctgtactgtgcccatatttccctcccggttgctggattgtggatctcaccagcagttgttgggaaagaggtccgagggacaagggcacgcaggaggctcaaggcagcagccatttaccaactggtgtggggtacaatcaggtgtcacttaatgacaggaagggatgtgttctgagaaatgcatcactcagcaatttcctcattgtgtgaacatcacagggtgcacttacacaaacctagatggtagagcctactacacacccaggcacatggtataacctattactcctaggctacgaacctgcacagcatgctactgtacagaatacggttggcagctgtaacagaatggtcagtatttgtgtatctaaacacatctaagcacagaaaagtacagtattattaatctcatgaaccaccatcatatatgcagtccattgttgatcaaaatgtcatcatgcagtggatgactatattttaatttttaaaaactgatgtgattgtcatgtttctttcccctgagtcatcagctctgccctcagcaacttagagccctgtagccctgtgtcggaggacaggcacaatgacttctgagggttgtttcttcctgtccactccaaccttcctatagttactgtggatatggcataaggtggtatttcgtacctaaatgtggagtacttgcaatgtcagggcatcttccaaatgagcttctgacttccatgattcccacaggccgtgtaaattttcctggttttgtgggtgagcagccaatatccaggctccacaggagttatcaccaccagagcttgcttaaaacatttagacagtgagctctggcattgtccctctcaccatcctgtccatggggttttcctcctgctcgcatccagacccaacctgtgggttaggtgcctgtgttctggggtcaccatcctgggtctcccaaaacaagcatcatcccagaacttgtgggtcctctatgggttgccctggctctgcccagcttctccagagggcagcagttgcttgtagggtccgggtatttgggacccactgccagagcagtgccacgcggccggtgggcagtggctggacttcctgtgtgattctgtgtgctggggaaaggttacctcatggcgtgtgccctgagctctgctactgttctcttttctagttgtctgcggtgttttatggtggctgtattatgactataccaacgacctcagcatagaattggacacagaaagggaaaatatgaagtgcgtgctggggtttgctatcgtatccacaggcatcacggtaagaaatgctcttctagcagtaggtcaggtagccagccaggactctgaaatccaaatcattgaattctagccaaaaacaactataatttgtttttcttttgatttagaatgtgccttctttggatttgagatacctgtatagggataattcaaaactcttcaaaaataagaaaaaaaggttttagttcttcccaagtcatttctgccacctcccagagactactgtgttatccttgctgttgcactgttctcagccccaaggggctacaaggtgggcatggtgggtgggcggaggcaggcttacggcagttcccattccctgtttgtgaggtgcggctcccctttgccagtgtatgctcagcttccgctgccctctagcacacagagccctttgtttccaaacccgctggccactgggttattttggtgttcagagaacttgctgcctcctcagtgaactctctagctgaaaacaggctgacttagaatattgagggagcaggtattagttactggtggtgggtggttggcaaccaaatgtcattcaggaccctctccaggggccgttaggaaggctcaaatcacaaggccctggggcggaccccacactggcttcaggtcccccagagtcgtcgttgctggtgtgttgcttactgactgttctgtggagcagctgcagccaggggtttccacaagcccattgaatcttgcagcaaatgcagattctcacaccaacaaaattctctcataggaaatccttctattctcatatttggtagttttcacattttctcctttccacggtgaggttttgggtttgtgatcttcacataaaatgtgccagggagtaagggtacaataaagtaaagcacctggttgctctcgcctcaggcagggaccagaccagacactcaacagagtctgcagaggaggctggagatgaaagggcttccccattccccaggctgggcataggggaagaggagcagggctgggggctggggagggtccagttcctccgtctaccctccacagggctccctttttgtttgtacactgcaccatttatgccacccagatttcagggccggggcaaggttagggagaggggaggccatgtgagcagggaggctgttttcacctgggtccatgagttctgcacaggggctactctataaggcagaattgagtcccagctcacctcccgttcatttgttgtgagttcttaccaattcccggttgctagatgagctagttcactcatcctcagaaaagcccagatggaagttcctcctcagcctttacaactgaagggtctcctctgggtgtcttgcggggcctctcctgacacctctccctgcatggtcaggaggctgtgctcccagatcctggagcagcttctgcagtttatccactgtcactgtctttcctccacttgactgttgacggcagaaacgctccagcaaagctggaagagaaagagcatctcaggccaagggcacagcatgcatgaggtcacatgggcaggggtgtgacttgcaggaagttcccttgatggaagcctgagatgcaggtgcagggagggtcatgtcacaaaggtcctgatctgcaatgatgataggtttgatctttctccagaggcactggggtgccgtagatggattttgagccgagaaacaccatctttgtgtttgcgctttacaaaggtccccttagctgtggagtggaggagggactgaggtggggcggggtggggggggtggtcagggaggttaaatgcagaaagctaatgaggttattggggtctagaagaaagaggctgagacttgagctgtggcatcagcggtggaaacagagaggaaaggaaggcatgagcggtattgaggaaactgaaccagaggtgattgagactgtactgggcactttgccagtccttgaccataagaatggccctgctctctaggagcctaatctaatgggaaattcagacgagaaaacatttatagaatatgttaaatagtacaatagggtaagtgtggaataaaatgggagcacacaagaggggaacctaacttactcttggaaagtctagaaaaattagggccactggaggtaaagaatacagggggaagaggaggttctagtatgaagataatgaatttgattcaggataaattgagtctgacatactgtaggacatccacggccttgtcaataactgatgtgcttattcttccagcacctagaggaaagtgaggctggaggtttttatttggaggttgtcagcatctaggaaggatgctgaaagcacagaggaataggagatacccccagaagatctcaagaagcagcaattaaagaagtaggagagctaaaagaaagatcatggaagccaagggaggaaaatgtttcgagaaaagaggagtggacaagggatctaatgctatgctgaagtcaagcaagacctggaatgtttccatggcatttaacattcaggaggtcacatgaagtgacttcagagagagctgtttcaaaagagtgttgggatctggatgtttgtgggtggttgaagaatgagttggggtatggaaatacagatgatgggtgtagacaagccaagaagctcggccatgaaaacagtaagagacggcagtggctggatggggatggaggggtgcagaatggtttgtttcattaatatgagatttgtaaatgtttatatgcagggagggaaagctagaagaaggcacagaaggtggctttgagtctttttgcctcatactcatattcccttgacttttgcaatatcttgggttctgtgggatgtggaggggaggatataagacagttccttgacattagaagaccttattctcattttatctttttcactgaccagactacaaggccctttatggagggactgtgtcttcttcgctattatgtctattaagatctattccagggaccagcacttactagatgctcagttagtgtttgcgaatgcatctgtaaaattataacaaagtagtgagtaactatcttaaaagagctgtttgctgagatgtcataataatagtagggcttgctttaagctctacccagttctccattatttggaagtaatttactcaaatccctttctcaccaggcagtgctgctcgtcttgatttttgttctcagaaagagaataaaattgacagttgagcttttccaaatcacaaataaagccatcagcagtgctcccttcctgctgttccagccactgtggacatttgccatcctcattttcttctgggtcctctgggtggctgtgctgctgagcctgggaactgcaggtaagggacagtgggtgtgggttccatcaccttggagtcatacacagaagaccattttggaaccactggcctgtttctgtaggcacctaacccctcattgagccagaggtgtctgatgacagcagcgttggtgcttggggctctgtcatggggaaaagtgggaagttcttttacctcttctatattggttttaaagaagctgggtttgtgtttcatgagagaataaattcagtaaggactgaaagctctaggaaaaactacaatatgaacaaaggccaacagcaagaatattaccagatgtctccaggtatgagttttatccaaggtaatttgccaacccctatcaaatcagtaggtgacaaagaagaacccaggaaagactctattaaaaatatattgtgcagccgggtgctatggctcatgcctgtaatcccagcactttggtaggccaaggcaggtagaccacgaggtcaggagtttgagaccagcctgaccaacatggtgaaaccccgtctgtactaaaaatacaaaaattagctgggcgtggtggcgtgcacctgtaatcccagctgctggggaggctgaggcaggataattgcttgaacctgggaggtggaggttgcagtgagccgagattgcgccactgcactccagcctgggtgacagagcaagactctgtctcaaaaaaaaaaaaaaaaaaagtgttatgcccagcagagccagtgtacatttaaagcaaactcatagttcacatgccttggtcctgaaaagacaagattctctcctccatccttttttcatatccacacagtggttcttcaccagggctatttctcagaatcagctttggtgctttattaaaatacagttatctgggtgccagcctcagagattgattcacgtggtttgcggtgggacctagtatatgttcttgtaaagctccgtaacagggcaagcatattctaaagcagcactattcagagtgcagtctgaagccagataaggagcttagctagaatggacgtcattccattgcttccttcattgagaaagttttgctatggaagaaactgtcagctgagaaacgatgtgcttagtgatgcagttgatctacattctggcacaagctttttatcttactaacaatgtgaggttagacagcttttctgtggaccacactttgagtggcactgtccagatcttttctaactcctctgtttgattttcttaaggcccaaattcagtacacatggatgcaagtacaaaagagtaagtggcttcctgatactgtcaccagactgataaggaccacagctgatgtcaaatcagcaaggctgatgcagttccttaatgttttctcaagtttatcttgtcccttactggctccagtcatataagtaagaacagctgccatgtaatagattcttagtaaactcagtccccttccttctcctctggagctaactgaggccacagtgccaagatcgtcagcaggctgcctggaaggcatggcccttggaggcctatgtttccaccttcagaggtgcataggggcagtcttctactaggggctccctggaagctcgctgaaggcctgcagtgaacttctgataattacccagggaggaacattggtcaaaagggtataatccatcagaatgaggtttgtctggaagtgaaagaaaactcaaaacaacagtggctaaagtaggatgtaaggtaatttctctgtcacacagatgaagtccacatggagaggatccatgccagcctagttctctagcgctcaaggactcaggcacccgctttcttcttctgcagcctctgcccttgcttccacctcatagtgaaaggctgctcaggctcccactgccatgtcttattccgaccttgaggagggtggcagggaggaaagcgagcatgcccctcccagaagtcacaggtggcgcttccacccacacctcatcagccaggtcccagttacatagcagtgcttatctgcaagggacaccaggaaatgtagtttcattttgggcaggcacgcaccaatcagaggttctataaccaagaaaagaggggagaatagatatcgtgagacaggtgaagtctcagcattggatggccttcctctagcgagcttgaagtgggctcagccctggtcagaagggagggcagtggccccggtgcatgaagggaaacaagcctttgttgaaaatgtcctagattctaatctctgtactggatgctttcttatgttctgtcccccaggcatcacagtccccgtgtgatgtgggtattgttatgttcaagttacaggcaggaaaattgagattctgaggaagtcatgtgccggaggtcatacagctgggaggcatgacgtgctgtgactctagagctttggaatggagcctgtgctctttccactaccttacacctcccttgcatctgggatccaaagctaggaaataaaaataggcctctttaggccgggtgcagtggctcacgcctgtaatcccagcactttgggaggccaaggcgggcggatcatgaggtcatgagatcgagaccatcctggctaacacggtgaaaccccgtctctactaaaaatacaaaaaacttagccgggcgtggtggcgggcgcctatagtcccagctactcgggaggctgaggcaggagaatagcatgaacccgggaggcggagggtgcagtgagctgagaccacaccactgcactccagcatgggccacagagtgagactctgtctcaaaaaaaaaaaaaaataggcctcttcaagtttgctcagaatgaagctgtatcagggaccacagcagttggctggtggatgtgggctgtgcccataatgtgtctggggctggaggttgacagctagagccagctggggatgaggtgtgatggaggtggtggcagtggccctgggcagcagcactgtagggcttgaaccctagcctctagagaatcatcagagaaacagtgaggtcttaggaaatatggctcaggaccagtgaaggaccctcctcttcccacctccttaggtgcagctggcccagccagggggccccttgttggctgtgaatctggataaggggaactgtgtctgtggctagaccccatgatgttttggagcagggatggttttaatttaattcagaagtatttggtgggcactgtggggatgaggcgctgagcacggcactagggagaggtagggaacaggattgaggtcgactctctgccctcagtacttatagtcaagcaggatggtccaacaatgaaacgtgtgatcgcagtgaagattgatggatgtgatgatcagagaaatctggggagctatgggaacaccagaacaaggccgtaacccatgctgtgagtcagggagggcttcttagagggcaggctggaaatcgccaggtcagaaaatacagaaagaggcaaagggggatgcagcagaagtcaaggcagcacaaggagaggacctggccacagaggtcaagggaagagcccaggccagtgaggtcagaaaggagcaagccccaaggctgacttgggcatgaactgccagcctgtgccccttaactgccagcctgtgcccctgactaggtctaggttgggcccagggcttagtagcctccactgcaagagagacctggaggttattcttcagggctgaaggtagcgtgtcattctgcagccacctctcaggatcacacagtgaagtgtgacgattcactgttagtgcaagcagcaaacagcgagaacagtagaggggccagaaaggaaactgggtgccccggacctatgggaggcatctatgagcaggtcgattttaggcttctcaggagagaaggtgctacgcagagccaccaccccccttccccaccccgctggggtcaggcatcatagaaaccaaatcacccgtcccctccttccacctgcctgtggccgacccaggtgcacagggtcccctttgttctcagaggccttttcaccagtgccagagagcctggctctgcggctgggcagatcagcagctgaatcactttttgatcttcagaagatgccccagctaacacttgagagggactctgagccgctttcacctcttatgaagaggcgccaggtgatcgggtggcgagcccgctgcacagtgcccgattgtctcattccacgtcccacaggcagcttcagcggggacagacacactcttcagttagcgcccagttttgtgtgtgggcgtcctcagtacataaatagttgtttgtttgtttttgtgttttgttttttgttggtttttgtttgtttgtttttcttgagacagggcctcaatctgttgctcagactcaagtgtagcatcaacctcccgggctcaagcgatcctcccacctcagcctccccagtagctggggctgcacatgccactatgcctagctaatttttgtatttttttgtagagacaggattttgccgtgttgcccaggttggtctagaaatcctgggctcaagcaatccacctgctttggcctcccaaggttttgggattataggcgtgagccacccaaatagttgtgtcagatggttgaatgaatactattttttactgcattaaaaaaaataggagtgaacttgggttgatcatttttgcccagatgtgctatttttctaatgactgttaatcattcttttgactagttgacaaattctgacttgtttggggattttttttcagcaggtcatatcaagcccccatcttgcaccacccaacaatgacatttagtagtccattgggatttgtctggtaccagcaataagacagtaattactaaaatccaataggaaaaagtgaaaactgtggtaaccttggtaatctggtaggttggaaagagctcagatgacctggtcacctccagtgttcattaaggtggtctggaagctccagagtctgtacaatagaagagaaccatattggattttggcagggagtggacttcccgcgaggtctgtgctgcagttagaagatttaatcacaggactgcacacagcatacaccgtgtacttgggatacacaaaggggtgagcttggaaaggaggcagcagggtcagacagagagttttccataggtttcccatcaaatgacctggaacccaggctggctctgcctctgcttcctttttgccatttttgcaatggaaaactgatgtaaggttgcctcacaaggatgttaggaggctgagatgagacaagagctttgctttgcaaataagggaccatatgtattttttatgttaggaattaatgttgaccaaggaacatctagtaccttcagctctgtagtttattctttgctttctctggcacattcaataacacaatttagaagaaaattgtcttttttttaagttttcagagatctagaagataattgaagttattttgcaaaagcctgctagtggcccagtcttgttctaggaaaagagtaaagggaggttgcacgggagagagttgaaacagctcctgcatttcagaagttcctggtccctttgggaaggtgcaaaggaaagcagtctccatgcacatccccatacctttgctcctgctgggatcttcctctagaatcccctcccctgcccaactctcaccccaactctccccctaaactgcttccccaaactagtcattcttcaagattggtttgagtattattattcttggaaaatctcctataaatttctcagccatacttagatatttctcctccatttttttccttgcatattttatattcttcattctttcaacaactatttatctcatgcctgccctgtcagccctggagtcacactacatgccctgggtacttgagatacagcagtgaacaagacagcagttctgctctccaggcctgacattctactgggtgggcatagaggcagtgaataaggaaatatgcatcccttagtgataaatgctatgaacaataaagcaagatgtattgtcatcccacaagaggaagaacacgtgagggccaggaccatgcctttttctttctgtgtctcttagctcagttccctacctgaatggattcagttaggggtgctgacccagggaataacatcacatcagtgtcatggttgtgaaatgagatggatacatgaagaactcatatattgcaggctgcctgtcaatgagattttcctctcttttttcctaatcctcatgctgccagagccgaagctgaagccagtgggagacacaggcaggatgaatgtcagcaggctggggctggcaggactcttgggccagtttgctggacaaggccaagtgcacagaatgtgctggaaagtagaacccctccaaattaggcctgcttcccttggggaattatcctgaccagctggactgccttccataaggaactgccatctataacaatcattatatcaccttagtcttttgaaatgctttaaagcttgctaataatatccagacttacagctaactgcactatgaatatctttcagattattttgatgctctcaaggaagatctctagaaaattgtctccaaatctctttaatagaatatattacttgaggaagatatatccattcattcattcaatcaacaaatatttattgaatatttactgtgtgtcagaccctattaaaaatgctggagatacagcttttcttccaatttggagggtagaaggagacaggctttaaataaagtaagtcagtcaatgttatagtactttaaaagttgataagtggcatggagaaaaattaagcagaaaggacaaataggaaatgcatgagggggcagggtgtcattttaaatttgacgatcaggggtgcctcactgagaaggtgatgatgcagaaagatttgaagtaggtgagtgcagagccataagaccatctaaagcaaggggaaacatcccaggcacagaggctggcaagaggctggagttctagggcacagcaagggaagcctattcagcgagagtggagtgggcgagggagagcttggttcagaggggagtcagggtgcacacagtcagatcctggggcctttctggcctttgtaggaactttggcttctaacctgaattgggaagaagtctttacaggattttaagcagaataaaatcttgacctgactacattttaatagcagtgattcagtaagaagaggatggtggcttggaataggtcataatgttggaagtggcatgacatattagattctgcatctattttgaaggtagagcaaattggattttctggttacatgaaagaaagaggagttggagaagactctgagggattttggcctgagcaactggaagataactttgccataaactgatatatggggcaagaatttgagtatagcattttaggggtagatcagaaattaatttttagttgctttaattgaaatgtcttttagaccaccagatggagatgtcaagtaggcagttagctatctgagtctgaagttagtggaggaggtcctggctgggattcacatttaggaacttgggaacatattaatagtatttaaaaccatgagattagaatgaatgtagatagagaagggaagaaatccaaggactgtgctttgaggcacttcaggatgcccgggagatgagggagaacaaacagagaagactgaaagggagtgaccagtgggtcgaaggagaaggggtggagtgtggggccctggaatgcaggtgaagggtttcacagagatgtgcgcggtccagtgtggcaagtgctgccgctaaaggaagaactgaggattgaccactgaataatcatgattggagtaggtgaagagaaagtgggaggaaaagaattggaaagagtaagtatagacaatcttgaggaatttcactgttaaaaggaacagaaatggagaggaagctggaagaggaaagagtccacagtagatttttcttaaagatgggagatagttgcgaatgattcaatagagagaaagattttgatgaagagggtgaaaattattgaagagttatgttcacacaggttagaaagaatgggatctggtgaagtgtggccataggatcatgggccatttattaatatcatgttctgggagaggactcagattatggacccgtgttgatagcaggttaggtgtgaggtggtcagcactagcagaggttttctgattgcatcagttttctcagtgaaacaggaggtaagatcatgggctgagagtgaggatgggaaggaagctcttgaaggttgaagggggaatttataaaacagttgggcagaagaaggggaaacaaatggaccaatatgggagcatgtaagtttctgatagtaactcagatggtatcctctctctgatttttttttttttttgcctcatttattgttccgcctaatagctgaggtccagcataataccagcatggagtagatgctcaataaatgtttaagttaatttcagaattggaattctatctacctatatctcatttatagctaaccctgtgtggcactcactgtagctgaccctattgcacttactattctaagagccttacctgtttattatacttaactcataacagctatgtgtattgcactaaaagccacaagacaggacgagatcaccaagggtgtgagaagtaggtattaccattctccgatttcaagtgatgaagcagatttcaaaaaaagtcccactatttgcaggaggttgcttaggggacagtgcagagatgtgactctcagcctgtgtgactctcaagcccaagccagtaatcactgtcccaagttcatcttgcctactctcttcttcaccatcagagagctgtggcccacattgtttgtcacacatttcaaagctgagcctggaaccaagccttctcacaattcagtgctcttcccaccaccatcccctgagatctgtcatatcttgggatctacccatagtctacctcccattaacacccattagctacccatgatagtagctgtagtgcccagtccatagagacaaagcaactgtcatgtgatgaggggatcttgcctgcattcacacagccatccaggagagggcagtcatgtgtgcctaagcacgtctaccccacccacaggctctgcaaccgcagactccgagctagatccaacctgtttcccggctttcgccctgaagccagagcgcccctgaacgtttgtctaaaccaatggttctcaagccccccgcgccccccggtgactttttgcccctgatatggcatttggcaatgtgtggacacatttttgggttgtcgtggctgtgggaggggagggagagcttcctggcatctgtgtagagaggcgaggcttgttgctaacaccctccagtgcgcaggacagccccagccccagccccagccccagcgaagatctggtccacaatgtcggtgagaaaccctgccctaaaggaaagtcctaaacagccccaggaacaaatagaagatggctttgataaggatgttcagaaacaatagtgatcactcaaaaataacttgcaggttctgcttctttggggagtgccaaatgccattctttgggggaatgccaaataatgtctaagcggatcttgactcatcacttcagctgctcccaccgctgactgtgccaggttgggaggtgtgcgtatatgtgcacttgacagcacagggcagctgagaggagagtctggcccccattagcgtccaggtcctgtaggacatacttacctttgtctgtctgaagaaatcatccttcctgttctgtggaaatgttctccgcccgcaaactattcgtgatattgtaaacctagttttgcaaaagcataatctgtcgctgatactgctgggccttgtaggaggagcaggtacttcttccctggctcagagcacttctcatattccagagtggttctcagagtccactgacctcatctacctaacaggcattctgtttgggaggggccacctcctctggaattgggaatgtttcctgaagcatgccctgaatcaccccatcttagaaaaccataggcatttatccatgccttacccaaaacagagattgcctccaagccaaagtgagcccagcattcataaaacattaacctctctataaatcaagctgctccactgtttcttacaatgtaattcttgttcagcagaacatagagcttgggaattaagatcagccttagtcagtggaatcagtttttgatctacagcacggatatcctcccctttccttcacacagaccctactgtgaatatctaaggactcctgaatgacgagcctaaagtcaatttatagctatggcaggaaatatgaaacaatctctaaatgttcttcaagctataggtttcaccaaagaccagagcatgcatcttcttcccagtagtagttgttttaaaatccatagtgggaaaagatctagaaatcatatgcagccacaaagctgggatttggatttaccagtgaatttaccagtggatttaccagcagagtaaatttggatttaccagtggatttaccagcagagctaattcaaggacttctttagaggagagaaaagaaagcagggtatagccacgtgaatggcaaaaagttgttacggtgaccttgctggcctcagttgaaagtagtactgtgctcctgaaatttaatgatagtaataaaccattatcacttatggcgcgatatgtctatgggttgggcactataccaagtactttccaagtactctcactccgtgctcaaaataccaccaggaaataggtattctagataaggaatctaaaactcctccaggtattccagataaggaatctaaaactccaggaagccaaataacttgtccagggttacccacaaaggggtaaagctgggatctgaacctgggaaggttaacactgaggcccagtagatattttaaatgtgctaagagagtttgctcttgaaatgaaatctgaaatagatccttttgagataacaaagacccttgtctcttttataaagtttaaatttttggtgaagtaggattctataatgtgatactaaaagctttgtgtggtttcatcaacgtgctgagtttggtttgcatcacaaagtcatatggtaggaaaactacggatttttagagtcccatgtgtttaggtttatattctccttctactaattttgagctctgagactttacaaaagttacttgcctcttcttcttcttctttttttttggagactggaatcttgctctgtcacccaggctggagtgcagtggcgtgatctcggctcactcctaccctcgcctcccaggttcaagagattctcctgtctcagccttccgaatagctggaactacaggtgcctgcgaccatgcttggctaatttttgtatttttagtagaggtggactttcaccatgttgatcaggctggtcttgaactcctgacctcaggtgatccgcccacctcagcctccaaaagtgctgggattacaggcatgagccaccacacccagcctacttgcctcttctaaacctcagttttcacatccacaaagtgggatgagtattatagcatatgtcaggtgtcttggaaattgcctaccaatggtcactgtaattatcaccgttggtgttatttagaagttaaatgtgtgtttttgattttgatttttgtatattttaaattatggtgggtacttgattttggcatttgttttatgtaatgccaaaggccaagcataaagaaacatggcttgttgaaccatggttcatgcttaggaaaacattggtgtaaagcatgtttgtgtttgaaactttaggagctgcccaggttatggaaggcggccaagtggaatataagcccctttcgggcattcggtacatgtggtcgtaccatttaattggcctcatctggactagtgaattcatccttgcgtgccagcaaatgactatagctggggcagtggttacttgttatttcaacaggtaggtccagtgttttttttctattggtttgtctatgtggtttatctatgtgcttcatgttaatatctcaaaagatatttgggaatgttgacctagccccttaaaagaagttggcaagaataaaagagtaagctaaaatttgggctgtattctcatttggtggtgagaagaaatattacaccctaaatctgtcacatttccaacctttttactttaagctagaaaatttagaaagaagacaaacagaaaagagatcatattgcttagacttgaaagataaaaaggggctgctctgcctatggagtagcctttttttttttttttttttttgagatggagtcttgctctgtcatccaggctggagtgcagtggcgcgatcttggctcactgcaagctccgcctcctgggttcgagcgattcttctgcctcagcctcccaagtagctgggactaaaggcatgcgccatcacactcggctgatttttgtatttttagtagagacagggtttcaccatgttggccaggatggtcttgatctcttgacctcgtgatatgcctgcctcggcctcccaaagtgctgggattacaggtgtgagccaccgcacctggctgccattcttttaatattaaaaaaaggaagggtggaactcccctatgaatatccatcctaattgacttcagacaaaaaaattactggtctattttgaatatacttcagtaaattctgtgagcctcagtttgtcctctgcaaaatcagataacatttgcttggggaaaaaaattaatcctaaaggaattgtatgtaattacaaaatataatttatattatagttaagaaccagtgaattagttacacacttctctgcttatatccctatcacatcatgaaagcaattgaggacacacacaaacacacacacccctgaacgctttacctcttctgtgtgtgtgactcaccccagggcagtgagagccctcaggacagaggaacccagccagggcaatggcaggactgggctcagaaagagaagtttactcttcatagggctgatcctcctccagcctctcagaccaaatgagagagaaacatgagcttcattgggagagactatctgccaggggtgattcctgccattgagcagtttcctcctgatgataaggagcactgtcgggtgtttgtttgtttgtttgtttgtttgtttgtttattgagacggagtcttgctctgtcgcccaggctggagtgcagcggcacgatcttggctcactgcaacctctgcttcctgggttcaagtgattctcctgcctcagtctcccgagtagctgggactacaggcgcccaccaccacgcctggctaatttttgtatttttagcagagctggggtttcaccatgttggccaggatggtctcgatctcttgaccttgtgatccacccgcctagtcctcccaaagtgctgggaattacaggatgagccacgacacccggccaccactgtgggtttttaatgtagtggtgcagttccggagcctccatcattagagactccagaggactcacagaggggctgttgcccttggcattgagaacctccaagcagccgggggtgggttgtgtgtattgcttcctcccaggtaggggagcaaagagagtattctaaccaaatttgccagcaggtaatatttgcctgacagtaattttgtgttatcttagaataacaaaatcaaagcattttcaatgaggacttctaatttggacttccagtgaagcatatgcatttatctcctaatctcttccctttctccagccactcaaaaaatcatgaaagattgaaacaggcacaaacacaccaggacagtaagaaacagagaggcaatgacagcagataagaaacaccaaccaaatggtgagagccaaagagagggaggtggagcagtgccctaagcccgctggagaaagcagaagcagcctgtccgtgtgtgttggctgcatgaggaggacaaataagatgcagcctgaagtgagccacagaatcccagagaggctcaggaattcaagtataaaaagtatttccaaagattagctgaaagccttcctcaggagtagttagacccccaaattccacaccagctgaagacaggaaaatttgttctccagagagggaaagcagagagggcctggacttggggtatcaggtacagctgaggctgggggcaagtctctgtactgaaagcagggggagtaagtgaaagcctaaacactgaaatgaggtcccccacatacaccagcaccccacattccacagttcagctcccagaatgttggcagctcatttgatattccctaggaagaggttagaggatgcttttgtggagaaactgcctaacccaaagtaaagacctacagatagtgccatatggggtcccccaatgaaatggattccctgactcctagcaaaacagtgaagctcatcagacaacaagcaacatgcctcacacagagcttccaggtcattctggagagcctcactcttcaatttgaactgtttaccagtgattattaaacatgatgaatgcctctaagtgaaagaagagatcaaaatgaacaaataaaatgagcttagggaaaacggagacaatgcaggctgcaaaaggaaacaacaaagcaaactataatattatcagagagaacaaagatgtattgctaggatcccctcccaccaacaaaagaagggcatagtgagaaaacaagactcttgagtaattaaaagtatgattacaaaagtgaacattttctattgaaggattaaaatataaagtggaagcactctttcagaaggtagaataaaaagacaaagagacacaaaataagagagaaaggattaaaagaggataaatttgggagacccactatctgattaatatgagcccagaaatacagaacaaagaaaagaagaaagagaggaaattaacaaagaaaatttgccagggctggaggacacaagtaaaaagaagattccagaagcttcccgagggaaaaaagatcacaggcaaaggatcaaggacccagaataggatctgactttcaccagcaactctgaaccagaaaaacagtgaaggaaggctgtagaagtctagtgaaagattatttccaacctagaattgtatagccagtctatacctagtatagagttgtatacctattcttactaccagtcaagggtaaagaagaacaaagtcatgcacaggcagtcccaagatttccctgccctcatcctttctagcagggatgttccccactgaaactcatgtgtaagccagagaggaaaacatgagtttcagaaaacaggcttgagcagagcagagcaaggaattcccaggagggtagctgcgcagcaggcgtggaaagcgtccagtccaaggtagacaatgggctccaggagagatgtcaccatgaaaagaaaatggaactgagggaataccaggtgtgttcgaacacgttaagaaaagcattacacgttggtgaagcgttcggtgaggcccatggaaatccaagctaataaaaaaatgtgaaacaattaacttcagaaaaaaaaagttgtacaggaagggaatctaattggaatatgctacttagatcagttgtgaatattatttacagcacatattatttatgtatgaataacaaacactaagcattaactaaaagctttgatgtaattacattggaagaatgggaacatgagtgtgaggagattgggggagttaggctatgtaagaaaataaaaccagaatctttcatagtagaaaagtcagtagacaatatctgaagccaaaaaaccaagaaatagcagtaagaacatgtaattttgaggtgtggaagtgagttctctaataacaactaaaatattatctcagggagagagaattatgaatgggggaagaaaactgctgtttttcctattaagcctagcagtgatttttggctttgtaagacactttacatattactttgattaaaaaaaattaatttataatataacacacaatgatttatttttagcacaactattgcatttattaaagagctctgcttcctttttgattttctgcctaattttgaaacctcaagatttttcctaatcttcaaagttcacaattcttcgtatccttttctggcctgcactcagggtgaggattaaatatagccagggtgcattcatctttgtcattcatttatgcactacgagggctgaagagttcatacaaataccatcaggtaccaggatatgggcaatctgtagaatttactttttacaaccatttgcttgaagaaggatcaactgagagccataaaggtggtgttagggatgtgataggaaggagctagaacccttcagggtggtggagggacacttgaggtgtgacttcatcatcattttcaaatatacaaaagagggtttccagctgctctatatctacagatggagaagaggaaatggattcatagcagagcctaaggaatttaggtagagatagatgaatttcctaacctagcaagagttacccaggccagctaaagaatcctcttctttctaataaagacgattttcattttctgtagaataggaaagaaacatacaaccttctcagccctccaaaccccatcttgcagtgattttgttgtaagaaatactggaagagacatggtctctacagggaccacacagtcctttgctgggaccagctttacgttggaggccatttgtcccatgcagcccacacctagtccaggagcctcagcacaaaattaattctccataatgtcagaagagtttttagtgagcacgaggctggatctaactagagccaaagcttgtctctaggaccatgatgcggcttgcctggctgtatgcactctgttgtctgatgggagtagaaattacaaaacagtactttgtaccatgacccaaaggtgttagaggacttggatggatgggaccattaaaccctttgccccacagcttggattgatgtggtattttgggcaactggcttcgttgttctgggagccaggcaccattagcactcaaagcagccacacatccaaaggaagggggaagctgggcttcatggggcatatgctagagtcgccttaccctctaacactgcccgtgtcttccttattgccactacccacagaattggggtggatgtggtccagtgggaagatctagagagagatgaggaaggctgactgggggcccagtcctccccagcctcctaatacactcatcgctgggttgccccatatgctcaacactggaatgttgtcccccaggtcaattcttaaaatatgaataagtccagaggtaagtattatatttagcatcactgggtgtgtcagatcctcttcctgaaggcaggtttggctggttgtgagggagacagagctggaggcactagccccacacacagcaggggagaggtggtaggatgacgttacctttgaacatggaaatgagtctgagactaggtgggggcctcagagacacaccacttcattagccttttttttctgtagggctgtttctagttttgagggcaggtattgagtgactcctggctccaagagctggcttgggttgaaagggccctctttttaagttccgtctcccatcacgtgataacccagcttctggaacctctgcatcttcttccagccaagccaggcagagcctccagccataaccaggatgtgttacagactagggaagctgaggcagtgcaggtactcctctgcctgaagtggttaaccccatcacagtgaaacctcagaaagctgatgcctaaccccaaactctaatacctggagggctaaccccaaggccctcattcacagaggcctatgaatcatgtgtttccctaccagatggaaagcaggtgttgtcctcttctccctgcctcccctcttgagcaccataataagttctaaggcacacaaatctcctcaatggaaaagtaaacattcttccttaaaaaaaaagaaaaatgagggaagggaaaaaaaagtgtgtcagattttcctggcctacactactcttctagtttatcagatctaaatgaattcctattagcaatagcttccgtggtttttcctactttaaataacactgtgttgaaacacacatcctttttttttgtgggacaactgggttgcagtttttcagctcccaatattactttcatgttctctttttcttcctggctgatttgagtaacagcaaaatgcagccattgccaactcttgaaacatttctggctgccttccttttcctctctcaaaacctaggctgctgtcaaaaccttaattcatagtgacttattagcaaccagagcaagttgtagaataatccattataaagaaaccaagcttcacttggaatctgtgaagttgcttctcagaaagaccttattttctagaactggcttcagcgggaattcaaagggtcacccgtggggtggcatcagcccccactcctttgttttatctttcagggttaggggagagtgatggctgtgcccattctgttctttctcacttttttttccctgcctgtgaaactgacttgtacacattcttgggagctgcgtcatgacaagtcccgtaaatgattcacactgaagtgacctttaaagagcagagtagaaaccagcaggatttggggagcctagagctgtgtaggagccaagcacccagggctctctgtccctttcctgtaagtgggagctcactattacctctctggccactgatcctggtcatgtgatttggtgatgatttttaatcaccaggtgaatgctggcaatatttatgtatactcctgtgtaagttaaaccttggagattgtgccgcaattaaaattctgaaagtgaaaatgagatgaataggcaccctaaagggttggtggatgggctctgcattatgaagagggaaacttttttaactcatcaatttttttaaattttttctgttttatttgtagcattaagtggcaccaaaacgaattaaattaatacaagaaacaatttaaccgaagctaccaaggagtataaaaagttcgccaaatgcttattatgtcacaactttctaagttgttagtaccacagatgattggaaccagagagcttttgctgctttataaaaagtgtttttaaaatgctatccttttccctatttccagaagtaaaaatgatcctcctgatcatcccatcctttcgtctctctccattctcttcttctaccatcaaggaaccgttgtgaaagggtcatttttaatctctgtggtgaggattccgagaatcattgtcatgtacatgcaaaacgcactgaaagaacaggtaaggctacctcctgatacacagcacgttctgtgtttgggttgccagaaacttaattactggaaaactacagcaggtcccaggacagaaatgtgacctgtgacagcgggccgtgcagaaagctcctgcactcctcagctcccatcccccgcctctcccagcaaaacttttattttcccagagtctgtgttttgtttatggttttgtttattgggttttctccaactcggtggagatggcgtggggagggagtagttctgagttagctgattttccttcttatgtaaatgccaaacagacgggatgaactcttaaggtgaaatttaaacaagtttttttgtgaacatttatcatgcctttttaagtaaaaaaatataccataagataggaataatatttgttcatttctgttttgatgctaaaatattgcctgccttttgtgtttcctagagacagtcatgggaaattcctggtgtgtgtgaggaagaacgagggagaaaaggagagggtttgaatgagagtgtgtatgtgtgtgtacatgcgtgtgtacacatgcgcttgagagtgagaaatgggcaagctgacctacatctcagctcaaaggacagagaactgtagggcttttgtgcctgggggatttctcctcctagtttttatttccatgcacatttggttatgaatgccagtggaaaccagaacaccaggaaaacagctgttctcatggtatttctggcctgccaaacaagagaagattggacttttcccaagtcttctgttctcacacaatgttaatctcttcccccgtcaccaccttagagttggtgacttggtcagtttcacaaacttacctgattccaaccttttgagtatagctatgtgtccttagtaaattcaggacattttaccaataggtttacattgtattttggaattgttttcatttactttttaaaaagatatctgaattgttgatattttaaaatctataaccaagatttaaagttagtttatcaattagaagcaattgattggataacacataaaattatctggcttccttatctggaaatgcatgctaagcagttgcccctgattgtagaatattttcttgtatttctattaatattttgcttggccacattttgatgacttgaagaggcatttccatatccagggcaaaactagctacttttggctcctgcattttgaaatcaatccttcagtcttaggaaacttgcaggatttcttgaagaacaggacagcgttttattttaaatctatttgtgatatgtgtgtgtgcgcattggtaatagataatcataaattaatgagcagccgggagcttgctctccctcctaaagctaggcattttaaactctctggggaaacggcctttcataaatctaaaagagaaggcccaaggacctcagtggaaggcccaaggtctctctgactgaggtctaaaaggttatttatcacttcccagatcccacaaggaccaagggccaaaattgcttttagtgatgtcactattgggaaaatgtgtcctttcttaggttaaaaaaaaatttcttcctcagcagccttactgccccacactgtgtctacaatttaaatgtctcacacagccactgtgtgattttccctagttaaataggctcattcaccaacacagccaggctgaaaagtgtccagatcaagtttcatccaattgaattcacattgggatgagaaaatgtccatataaggctgagttattcctggggtcctcatcctaggctatttcaggattgttttcagggatgtgttcactctggagagtgggtaggatgcctccgagcacccttcccccaagaggttcattaaagtattcattcttaagctatgcacaagttcaagttatatttcaaaggagtaatttatccctcgaaatttagtcctgaaaaaaatctcactacaggatttatttcctccagagttaaacttgattctttatttatgtgggcacataactagtacctacagtgtattatttgttttttttgtttctgggatgtggatttttcgtgaatataaactttggtttgaaaaagcaaagtgtaccatttcagacacttaagggcagatgaagggggaagagaggtttttttttttactggaaccagaaggcctgcttttgttttgctgttcagtatggactaacctccctaatagcacccctaacacgtaagtccacaagacagaaatgttgctcctcagtaatactagaaccataattagtagtagtagtatgcacacaatagaacttctcccacgccaccagtgtttccccaggtgcataagtaaaaactgtgtttcctcagaaactgcctgcttttcttctttcctgtgttgtttttgactctgttcctttgttctcaacctgatccagcagcatggtgcattgtccaggtacctgttccgatgctgctactgctgtttctggtgtcttgacaaatacctgctccatctcaaccaggtacgtctctacctcttgcctcaggaacacacagaagggtccaaaggtgggcttcatctcttaggtcaaggtttggcaaattcttctctaagggtctaaattgtgtaaacattttaggctttcagaccagtctctctgtcacaaccactcaattctgccatcatggcaggaaagcagccataggtaaaatgtcaatgggatggatgtggctatgttctaataaaccttaacttatcaacactgaaatttgaatttcatatgatttttacatgtcaagaaattttctttttttgattttgattttttctcaaccattgtaaaattgtaaaaattgttcttagctcctgccagagaaaagtgggcggtgtgatggagctagctcctgggctgtagtttgcataccctaccctagaaccataggcctttaaagccatgcttcaaattctaaaagaaagtttttctcttttcagaaataaagagggaagggagtatttagaaaccctaagcataatgaatatatatcaactaagagctaattttcagtgtcttctctaagaactataattttcctgaactaggaaaagaattgcctccctaattttcatagatttcaccagtctttccttttcaagctgtaaatatgcctttaaaattataaaaattatatcttgcaattgtttggatttcagatttttttcctttcctgaatttttcaaattgatggaaatttaaatatgttgtatttctctatagagcatttaggagattttaatagtccttagtcaaatttacacaaagcagtatttttgtaagttagcaaactgttttataatttaaatgttcacagaaatctcacttagaaaagtatttcttataattgccccctcccaaagaaatgtacctttagaagtaaagggactaattagaccacctatgtttaatgtcttttaaggggtatttagaatacttttcattattcagggaaaaatgtagccttcttatagtaaggtctatttttaggctcttaaacttggagaacattttagagtatatttagttttcatttggattgctataagccagcatgtataaaacacaatcaaataccataggacctttcagaatgggggggaacatataacaagtcagtccaaaccgtttgaatacatttgtcgtggtgtaagatgttatagctattgtgtatatatccagacggcaacttcataaatattttgagatgcattgcaaaaatgtattaactatgataaaatatatatgcatgaaaaataaagtctaagaaacatatagatagactagaaagacaaaagcaatgaatgggaccattgatatacaaatatgttggccatatggccctacaaggcccgagggttgacctgttatcccctctcactgtactacgggaattcaggtactttccgcatccctctttcactcatggttttcatactggcccctggaagcctagaggctcctgtggacactgtggggaccaccacattaggagggcagagaaatggctgaggtggaggaagggtgggccctggccccatataccatgcctatactgcctggccttgcggcctgagcagctccactttatgtggtttaggggtgggagtgtgggagtgtactgaaggtttcatttgaggacaggtctctgctgctgaaacacatttgaaaacctctggtcccattttcacatttgtttcctctgccctgttatcctgagatacgtattttcctgccttctgaactttcaccaccttaattaatccaggaccatttcccttggtaattcaaaatgtttccaaactcataagtgacattaatgttaaccacaccttaatgaccattgtgaaggtgacgactccttttaaaagctgtgtcaatggaagtaatgatccctgattcacaaaaaaactaagccagccttgatccagctcctgtagtgagtcagtggtgcaaacagggataggtctttcagattctaatcatggtgcctgtgcactaggctgtggctaaacctgctttgtagtgtcttttccttggggtgactcctgtagaactgggtgttgccagctgatatgggtgatgctcagaggcctaaggttcaggagattgggaagaggaggaagaatgaaaaaacaagaattgatgtgaatattaatggagagggaagggtcacctctggtctacattgactactggaaagcagagtgaaataaaaatgtttaagaataaagatgattgtaaatggtgatcagagcaactgtcagcctcatttggcagtagacaaaggaaagtgagcataaagtgagaaaaggaatttagattcaccttttcagaaatttccttgcattggaatgacttactaggggacattgtggcatctctgtctctggaaatcagatttaaaaaggctgaaccctattttatgttcctcattttgtggaataggagctggaaaatactaaaagagaatgagatccatttgttaccatcaaaactcagatgctcatctttatttaacatcaaggagatggttgtgttttcccactgcttcttaaaagcctaatccatcttcactaaatcctagtagggaggcaggtggcagttgctgcattttgtgaacacccagcctaaggctgcacaggcattcacttgcaaggtggggaatgaaactctcagtctcataatttctcatttacttttctccctacatcataaatactgagtgtgtgcatactgaaaaaattacatgttcacctcacacatgcgttcatccagcaaccatgtgtttatgctgtatgcagactatttctacctgggcataatagggaccaggaccatggtgatacagaggtgatacagagtcattactgtatagtgcaaaaggcaagcctccaagaaattgacaagctagttgttgggagccaggggccagtaagtggtatatgcatgagacatttatatgacagtacagaaaagtacatgtttaagtgttgggatagggctgtggaagttcagaaaaggggaatcttggtcactgggagaggtcatttgactctgtaattaggggaaatttcctaggagaggtggacctgagtatagagcacccactggagatcaccagctactaacgacagcaataacagctgtgggtattggcaataaactattttgccagttgtatgctgagcacttttcctgcattatatcagttgttaggttttttgttttcgtttttgttttcttttgtttgagacggagttttgctcctgttgcccaggctggagtgcagtggcacaatctcagctcactgcaacctctgcctcccgggttcaagtgattctcctgccttatcctccggagtagctgggactacaggcacatgccaccacatgctaagtttttgtgtttttagtagaaacggcatttcaccatgttggccaggctggtcttgaactcctgacctcaggtgatttacccgccttggcctcccaaactgcagagatcacaggcatgagccaccattcgtggccagttgttagtttttgagatagtgtctccagtttacagatagggagattgaggcttagaggaggcacatagtggcagaactaggatttgaatccaagtctgttttccctccaggacccaagcccttaaccactgtgcatttttaaaatagccagaggaggactcatgaccaccacctggggatgtgagcaaagccagagtccagacaagtagagctggcagagcacatcttgttacacagcagacttttgtggaggaggacgggaaaggtgaaggagcaatgaagatgatgaactcactgtaactgtaatcaagcagttatccatccagaaaaggctggtcagggtggcctggcccctcctcctttcctcaggcaagttagtggtcaaagcgtctgggagtgttggctggctattctcagagactttcaggcaaagggaccttacagcctcccctctccctcccagcactttccaggggcctggctaagaaccccactgtgagactacaggctaagcactcagcaagaatggtgtacttactgtttcttaccaggtctgcacacagttcctcatggaaatgtctccctaagtgcacatctcttgtccattgtggacacaggcctctgtcccagccatgatgttggctttaggtcaatgttcctctaagtatgaaacccactggtgagccccaggactcttcctgatggttccaaactgatctgaacattctagaaaatccttttttcaatttttataggcaaatagcaggattccataggtttttcatttttgcatacaacaaggagctgtttgccaatcaataaagtaaagcgtgtgttattaaagcttactaaaatgtgttctttataaatccaaattggtgtcttaacatagtttcttaaggactcaaactcattactcttttcagacatctaactgccgaggcaatgcctggtgaccctgcaaaatttatgaatgcacacacgtagacagttgggatttgcaaactgggaaaagaacactttgctaccaccagtgttgccttgagttgactgtgttgtttggttgcagtcattcttgtcttgatgttttacttctgttgagtattccatttatttttttattttttattttttttgagacagagtttcactcttgttgcccaggctggagtgcaatggcacgatctcggctcactacaccctccgcctcccaggtttaagtgattctcctgcctcagcctcccgagtagctgggattacaggcttgtcccaccacacctggctgattttgtatttttagtagggatggggtttctccatgttggctggtctcgaactcctgacctcaggtgatccacccacctcagcctcccaaagtgctggaattacaggtgtgagccaccgtgcccggccttttgtttattcattctttttttttttaaatcactttaagcattgcattcctcttcaatgctttgttcttcttccagcagaagtgggaatgggtataggcaatgagctgtgggctagtgtcagaagtctgagaaccaccatatctataccagtctcctgggagaagcttccaggtaaaaatgacttcagtcaggtatagcagcagtttgcctctgcctcttcattatttgagtaacttgggtgagtcccttaaacttgctgagcttctgcaatatgaaagggttagattcagtgacccccaaggttcttatgtggctttttgacccttgtcatggcatccagcccagagctgggggcatgcacagtgctgccccacagcatcaaagccatgagatgctttgtgtgggaaatggggggagagtggaaaacaatatgagctgtttgttttcctgtggtgttccaaaatgacaggctcatttctcttcatgatataccttgtatccatggtgaggacttatcctagaaccacaaaaatcagtgatgtttcatgttgcctcaattctgaggcactggaatcttgtagagttgtctgagaatgtgaatgaacaaagaggagccatttatctgtatctacttacagcgatcctgccagtagttctgctataacatatagtgataaataaaataactggtgatgagatactggtcaaatgccaggcagctcggtcattctcaacagtaggagtgtactgtaatgtccaatgcctttcacagcccttttctgccttgggctatcatgcaagatagctgcgagcctgatggatctgtgctgcatccccttgaggagggaaccaagtgaccccgatgcaccttgatgcagtgtgtaaagcgtgcagcttactttcctttgtcatccctctagataagatctagtaagtacatgtacagattgttgcctcttgctatttgatcagaaatgccagcagcttcctgtctttctgactgatgaatatactggtcagaaaggtcccagataatcttgtgaaggtcaaggcagagaaaaacctgctgcttctggggaaatatacacctctctccccttcttacctcatagtgcctctccccaacctgctctgcctgccaagactgtttttagtgaacataatgttggtctctgtcttctaagcctttgcggcagactcaactttgtagtatctccaaacattctcttcccccgcccctttccttgcagttagctctgtttcaatgactgtctttctcgtagtccatcaatagctaaagcactcaatgacttttccacatcaggtttggttggttcatcccaagccagttggcagatctccagtgactcctcctttctgctctcccagagcagcatgtgcatctcagaaaaaaagtaaaaatattgtacagtttatctcactagattaggaaaatgatgtaaagtttcttaagaagaaacagttctttcagaagctggcattgccataataggtagtctcatcacgtagcatccagacagccattctttcagtgacagcggtggttctgaatcctccacccctgctgactggtttagagctattctgggcagccagctgatgttgagagctctggagagatgcctcgtgtgtgcgtgcttcagaaagaagctcacatgtgtgtcaatatgatagtttgcattaaggcccatttatagacaatggtaatccccacacccagctgttgtgtggcaaatgctactaccctggctttagatagaaaggaattaagacacctatttttcagaggccccaggctgtctgggagaaaacaaactgaatcctcatgtttcctggtgcatggttcagaagctgccaggcatatggctgtggcttagtgtggctttcctgggagcagcctctctggagcctagctcccacctgctgtgggcatgttacaagactcagggctcaggagggtgaggcccaaagccctcttctccaagtgggccttagtgctcagtcctttggggtaaggcccagtgagcagccgccatgttaaattggactctgaagtgcttcctgacatgaaatttcagtgccttctcagagagggaagtaatgtttgttgaatgaattattgcatgagaaagggagggaaagttatataagggcactcaggcagctaggaactcctgcgaggcaattgagtggtcagtgcaaatgacttcgacttcctcctaagtgtgcggctcccgaagacaagaataccagccactcactggcacttactatgtaccgggtactgtgctactttatgtgtatcaactacctatagcctcacaaagtagcctgtgtagtattttttaaacagatgataatactttggttcagagagcttaagtagtaacctgacctaggttagacaggaggaaagtagcagagctgactcttgaagttttgaagacccagtaagtcatttcctcttccttgtccaagttctgaataattgtgagatgtaagagtcaaacagatgaagattaaaaatatcaccttgaatatgaaatcatctgattggaaaactaccacaggaacagctgtaggcaagtcggcttgtcaatgttttacccctgaatcagaatgaccaacccaccttttaccaggcccagccaacaaggtgaacctctctatggatctgagaaaggatgttcctggtgacaggtggatcgcaaaagagaatgaggaagggcctgagcccgcctacactctgctgctccctccaaatttgcccagtcccttaagttcacctccttccctgaaacaaatgagaggcattagcctaaaggaagtccctgaccacagaaacccaaagccagggaaatcaagactagcgccacaatgggatttagagccaggttttcaccagtccactagggcactccttccacagggtagggactcagaagcccagaactttagagatcatgaaacagcctcccctcataatagcggaatctggggtccagagggtttgaatgcctcacccaggttacatggtgggcagagctcattctgattccattccctatcctgcatcttctcttccttgccccttctgagcctcctggaggacagacaggtgtgtcactttacacagtatgtctacatgagctgccctggggtaccttttggcagaaatctatgtaaatctcccccatatcttgggcaatatggaagacaggcccatgctcatggaggcagaagggtgaggaacatttgcatcctgggaagtttggggtctcaccttttattaatggtagcaagggcaactgggactgtttccaacaacactagttgaaaaggtcagctaatccaaggagttgccatttgtgtaaatctgagccttctttcataagtctgaactccatgtagaacatgaagcaaaccctttatgttctttgtgccttcctgtcatgacatgttctaggtacactggaaatatgctgagggagactgcccaggtttttaactttaagaaatccacctttgaatcagcacatccagtttcctcataaagaaggaagcaggtgacatgtgaaaacactgtgttctgatgagcagtgttcagatgtggggatctggcagctgaaactgactcctcctatgccctcccacccacaggttattgtgtgcagtggacaccacgctgcctgggctaggccgggccgggccgtcatctgtgatcacagctaggcaagggctagagtggggaggtgcctcagagtggaaaagggaactttccagtctaagttgttaacattactcccagtgctcaagaaatgtgaagaagatagattagcttcaacgtttcccaaattcacttagtgtggaaaataaaatgaaaccattaaatagctcctacaccaaatgtcctcttcccttaggatagagagcaggattctttggggcattgctctttgtctggaacagttgttgtccaaggggtctgactgcccaccttgaagtccatgctcttgtaagcaaggcagtgactgtaggcacgttcctcggctgtcattcttatttgtcctacggcattaagacttgttgagagaaggaagtgatgactggccagagactagagaatgcattcataaaaagaaaaaagcatatgaaaggagatgtgagtcactgtggctgaaggaatacatgccactttgatttagcagtcactaagtcatgtcctgctacaagcaggactcccatgacaccccaggccaccaccacctgagtctcatctttgaatgacttctacatgctatgaagagcagctgcagattcagatgtgcagatgatactgtatcatgtctctcaacctgatttctaactttgagttctcatgccactggacgggtggaaaacttaatttgttattcttgagctatccctcctcggagttatatgaggtttcaggtgtccctagacattaacagatataggttgcccttgagacatcatcctcccatctttatggccactcaggccctgcttgggaagtaggaatcttttacctatggtcacctatggtcctatctgccttgatgtgctagcactaggtgactacctgtcctggtcacctagaagccccatgtctctggtaccccctcactcccaggcaaaccaggaccctggaagtggtcagagaagagccttgccacttctccaagctgtgtttaaaaaaaaggtcgggggcagacctggaccttcagtcaagacccatagacctttgtttcctcttcccccagcccaggagagtgtcattttctaatgtggggctggaggaaacctgcacactcgcctgctgctccaaggtgtttggtctatattgggaaacctctttcttcaccttttcccctggtaggtaagggcttaaagagcctaaattttggaaaacaaaagccagtgagaattgaagactggatgtcttcttgcctccactccccacctggccccctaaccttaactgggggaatgagcacagagcccgagtcctgcttgaatggggaatgtggagagaagagaaaggagaaaatacacaaggcggagaaacagaagcaaagagagcaaagtcaaccatcatacatgtcttagggatggctggacattcctccttccattgagagtcccatctctacagacatttgagaaacaagtttgtgaaaagtagaagaggaagcggctaagagaattttgcttcaaacagctttcttatctaggtggggcgaaaaagttcccaaaagttttggcaagtggatccaggctttgacaatgtttcaagtggtttcctcttctctgtctcctgccttctacagaatgcctcagttggcatgggtggggtagagagagcatttgctagacttgcattcatcccaggaacaagacagctgaggttgaatgacttcatcgggatgcaccccagtgtgggtggagaggggtgctctgggtgtgtttgccatgcccacgtcttgcttccatcaaagcaacaacagagaaatttgggctggacgcggtggctcacacctgtaatcccagcactttgggaggccaaggcgggtggatcacgaggtcaggagatcgagaccatcctggctaacacggtgaaaccccgtctctactaaaaatacaaaaaattagccgggcgaggtggcgggcgcctgtagtcccagctactcgggaggctgaggcaggagaatggcgtgaaccccagggggcggagcctgcagtgagccgagatcgcaccactgcactccaacctgggcgacagcgagactccgtctcacaaaaaaaccaaaacaaacaaacaaaaaaaaaaaagacagagaaacttggttggggcccaaagaatgcgaggctcctgacctcgcttagtgccctgtccccagtccccagcctggagcttggccaaagcggaccttccatgtgtgtccatggattgaagaatgaatatgaggacccgaacgccctcagtatcagccccgggttcatgctgccttcacacagctttttaacatataccaaaaggagcagggaggcaataaaggaaaaataaatactaactcaaaggagctgccctttcttgttggacctgctgtaaccacacttagaactgactacaagggaaactactttctgagcagaagatccagtggagagaggaagctaaaatgggagggacagatagtctttgaggttcagaaagaaaatatctgtcacgctacaaagccacagtaatgaaaatggtgtggtactggcataaacatagatacactgtgctacatagatctatagaccatgtgaacagaataggaagcacagaaataatgccttgcatatgtggccaaatgatttttggcaaagataccaagaccacacaatggggaaaggacagtctcttcaacaaatgatcttgggaaaaccagatatccacaagcaaaagaatgaagtgggacccttaccttatacaggaaaattaaaatgaactaaagacctaaaagacctaaaactataaaactcttagaataaaatacaggagaaaagtgtcagaacattggatttggcagtgattgcttggatatgacaccaacagcacaggcaacacaataaaagtagacaaatgggaccacatcaaacttaaaaacttctacacatccaagaaaatagagtgaaaatcatcctatagaatgggagaaaataaattatatatgcttagaagttactgtccaaaatacataaggaacttctacaatttaacaacaacaacaaaaaaaaaaaacccgattttaaaatgggcaaaggacggccgggcgcagtggctcacacctgtaatcccagcactttgggaggctgaagcgggcagatcatgaggtcaggagtttgaaaccagcctgaccaacctggtgaaaccccatctctactaaaagtacaaaaattagccaggtgtggtggtgcatgcctgtaatcccagctacttgggaggctgaagcgggagaattgcttgaacctgggaggcagaggttgcggtgagccgggatcatgccactgcactccagcctgggcgacagagcgagactccgtctcaaaaaaagaaaaaaaaaaaaaaaaaggctgggcgcagtggttcatgcctgtaatctcagcactttgggaggcggaggtgggcagatcacgaggtcaggagatcaagaccatcctggctaacacggtgaaaccccgtctctactaaaaatacaaaaaattagttgggtgtggtggcaggtgcctgtagtcccagctacttgggaggctgaggcaggaaaatggtgtgaacctgggaggcggagcttgcagtgagtcgagactgcgccactgcactctagcctgggcaacagtgcaagattctgtctcaaaaaaaaaaaaaaagaaaaaaaaaggaaaaggacttgaagagacatttctttagagaagctatacaaatggccaatacaaaaagacactcgatatcactaatcattaggaaaaggtaaatcaaaactgcgatatatcacctcacacccatcaggatgaccactatcaaaagaacagaaaataagtgttggtgaggatgtggaaaagttggaactctgtgcactgttggtggaaatgtaaaatgttgtaactgttatggaaaacagtatggagtttcctcaaaaaattaaaaatgggtctataatactatatgatccaacagttctgttcctgagtgtatagtcaaaagaattcgaagcgggatctcagagttacttgcacacctgtgttcatcacagcatacgctcaatggccaagaggtggaagcagcccaagtgccctcagcagatgaatggataaagaaaatgtgatatagtcatacagtagaatattatgtatccaagtatatttcttcttttccttaaaaaagaaggaaatcctgtcatatgctacaacatagatgaaccccaaggacattatgctaaagtaaataagccagtcacaaaaggacgaatactgtatgattccattcagtatttccaatcatccatatagtatgatttctttctcaacctcagtactgattccattcatacagtatttgtctacttttactgtatttgtcaaatatggtattttgactactttagatactttaaatgctgaatgtagtagtcaaaatactgtatttggcaaacacagtaaaagtagacactgtatgaataaaatcatgcaatatttgaagtatctaaagtagtcaaaaatcatggaaacaatgtaaaaagggcgctgggggctagggagaggggaaattagtgtttagtgggtatagggtttcagtgttgcaggatgagaaagttctagagatctgttgcacaacaatgtgaatatacttaacactactgaactctacagttaaaagcggctaagatggtaaatgaatgttctacatttttttttaatgacaaaaaaaaaaaaaggcaaagagctggtgtggtggcatgcacctgtagtcacagctactccgtgggccaaggcgagagaattgctggagcacaggagttcaaggccagcctgggcaatgtcgtaagaccccgtctcaagagaaagaaaagatatgttactacagtgaatgtctctgaagcaaatgcctttaaattataaacgtttttcactgcaaggtggaccaaactatgttaccaaacgatagttattcccagcagccagtgactggatttctggccaggctgtctgtcaccaggccttcaccaagcagcctggcagggcagctctggcttcctcacccctaggctcaccaacagtgtgcttgtggaggcacatgcacctgacttgaaattatctccccaaaacatgcaacacatgaaaaacatgaatgttccagtttctgctctccacctctctcccaccatttcctcagttctgggcttcaaatcagagaaggttgacattctcttaagaaccaatcggccaggcgcggtggctgatgcctgtaatcccagcgctttgggaggctgaggcgggcggatcacaaggtcaggagatcaagaccatcctggctaacatggtgaaaccccgtctctactaaaaatacaaaaaattagccaggcatggtggcgggtgcctgtagtcccagctactcgggaggctgaggcaggagaatggcgtgaacccgggaggcgaagcttgcagtgagctgagatcatgccactgcactgaagcctgggcaacagagcaagactccgtctcaaaaaaaaaaaagaaccaatattctgccgggcacgttggctcatgcctgcctgtaatcccagcactttgggaggctgaggcgggtggatcacaggtcaagagatcgagaccatcctggccaacatggtgaaaccccgtctctactaaaaatacaaaaaaaaaaaaaattagctgggcatggtggcacgtgcctgtagtcccagctgctcaggaggctgaggcagaagaatcgcttgaacccaggaggtggaggttgcagtgagctgagatcgcaccactgcattctagcctgggtgagagagcgagactccatctaaaaaaaaaacaaaaaaacaaaaaccaaccttctaaagtctgtaagtcccatagacatccactgagttggcccagtatgccaggcaccatggtaaacatttggcatacacagtctaagtttatcttctctaggactctgcgtattaggtaggtattatccccattgtacaaatgaggaaactgagccccagaggatgaagagcatgtccagggtgacagcactactatgtggtcatcctcgtggctccaaaagctgtggcccactggctttgctgtgctgcctggagttccttgccaaggataagtgtaaagaggaggaaaccagggagtggcgctcactaatagggacgagcccatctatgtcatcttccttctgaggaagcttgaagtcagtaacagcccaggcattccccgtcctccgtgtttcccatgtcacaggtccactgtttaattttgccttccagaaagccaggccttgcttctgatttgctcctttccaccactgattatgcacaggtcaaatgggattaaaggatgtaacagcactccaactgggaaagagcttgggggatgaaggtgacacttcgacacggtcctctaacttggacctgcctcttcgttaggaatcattgttctggtgggctttccctgctgagtgcagagctttgctggcagatcaatgaaggatcaagtccagcaagatgccgttgcctaatgtggccttttctgaatttgtgggaggacaaggcttatctaaaacaaagagcactggctatgagcacctgattcctgttccatctttgtcgcttcctctacctggtcacagcctgtcgagattgccaattcctcattggtgaaataagagcatttttctaggtgatatctaggatgccttttaatccaaccattctgctgaaagaacaaagggatcaatcaattgaatttgggtttcatatgaagaaatattattcagaagacattattggtttgccagaggatctttctttatctgttcaacaaatattagccccacagagaggccaggggtcagaaggcatttcagcagagagaaccgcatctgtgagtggaggaaccgcaagggccttccaggatggtgtgaatgcagtggcccacagcaggtgtgtgaaggggcaggcatggtggcagtgctggatacacctcattaagaaacaaagactaggccgggtgcggtgacttatacctataatgccagcactttgggaggtcaagttaggcagacagcttgagctcaggaattcgagaccagcctgggcaatatggcatgaacccatctgtacaaaaaactacacaaaatttgccaggtgtggtggcgcatgcctgtatttccagctactcgggaggctgaagtgggagaatcacctgagcctgggaggaggttgaggctgtagtgagccatgattgagccactatactccagcctgggtgtcagagtgagaccctgtttcaaacaaagcaaacaaacaaagacaacttagatgtagagactttcatcatcaaagaggctataagtgttcaaaaccctgacaaagtcagaataatgaaactcactaaaatcaggatgcaggagaaggcgtgagaggactcaactttcttatctacactgcctaaacttaaaaccctatgttaaaaaaacaataagtactctaacttcctaacgtttcagaagacttttttaaaacctacgtcttgtgtgtgaaggtgcaatttgtctgaaatttgggtatcccttcagtgtcagtttagtttcattttcgtttgttgaagtcaaatgagcatttgtccttttatttaaaataccatggagagtatgagttcattatcgtagcgcatgctcagtgtatccagcctgcctttcttcctctgtgtatattcacagaggggtgctggggtgaaggccaagcaatgttagcagtggttatttctaaggggtgggatcacagtggccttcttgcttctttgtctctgtgttgtttgatttttttttaagattaacatggaaataataaagccattctaaaaattaagcaaaaagaaaagttttaaaagagcaaacaaaatagcacgaccctgttcgtggcttcataggcagctctcatgtttgtccttccttcttccaccccacctcccacctggctgcagccccaggggactggctgctttccctcctcaccatctcattggatgtttgtttgcatcctggtgaccggtgcattcctgaagggatctgaacggtgaatgcagggccctggaaggcccagaggctgtgcactgcctcactccacatgtgtttgtgataaaaacagggctcaagatgaaactggtctgggacggttcctgccagttttactgtaggtccaaggaaggcccctggatgtatggggatgtatctggactcggatttcactgtattttttttcagttctgaggaaagtatgaatgccagtgttatttattcactgttcagtttctcaagtttgttttagtagttcttgctttgagaataaatatcggaactctgtgaggaaggcattccagaaataaagctggctattcatggcatggtttttggcaaataccttccctccactacggagggaaactctgtttacctttttgaagagtcggcagaaacccaggttcacagttctgccaccaaaagaagaaagcagttcagttcagtgagaggacagactcagcatgatggacaaaaggctgagctgtgctggctaagcgtttgatttcaggagtaaaaaaacgctctttctatgttaaagctgcaattaacgttcttggatagctctcacagtaacttaaataggtaatctagattttctcttacctaaaaggacacttaaatctcattttcttcaataattagaattttctataaaatgagaataataccggccaggcgcagtggctcacgcctataatcccaacactttgggagcccgaggcaggcagatcacatgaggtcaggagtttgagaccagcctggccaacatggtgaaaccctgtctctactaaaaatacaaaaattagccaggcgtggtgggtgcctgttgtcccaattactcaggaggctgaggcagcagaatcaattgaccacaggaatacaatcgcgccattgcactttagcctgggcgacagagtgagactccctctcaaaaaaaaaaaaaaaaaaagaggcagcagggaataataccacccatggtgattatttcactgagttgtggtgaaaacagatgagatctaatgagacgatgatccgagggtgactggccacgaagcacaaacataaagcatcatggaacattggagttggtggaagtcttttccaagcagcaaagtgagggcccttgagaagtgacgtgatttggtggaagccgttccgcaagtctttggaggcaacatgactggaatccagcctctttccactaagccatcctgccacatcctcagctgttttcaatggtgcatctcatgagaacaccactttgttattttgaactttccaggagaaaaagcacaaagtacagctcaaagtaaagttttccagcagatgggcctgaacgagttagaggtccacttcatggaagatggacgcaacatctatgacacgcgtggaaccgggggcacactactttacctctctgtgctttagtttccttaactacctcatcgggttggagttaagaggactaaatgagtgaatgtgttcggggagaggtagcatagagcctggcacatagtacatgcaagattaatgccattattatttattattagcgttattatttatttacacacagaagttgcacacctgcctactgactggaaaagaaaaaggccacagatggaaattagaaagttgtagctatcattaggtctgtgccaaggcatttgggatatatcactaaggcatccaccgaggtgggggtggaggggagccagagtgcctggaggagttactattcctaatactcctattttctcccaagaagaactcacggtctttgggcctagcccctggcttatgactgctggcgggtcggtgtgctcaatggctgcatggccaccacagcatttccacccaactccagcagagccccgtaggcattgtggaggtgcttggggagtctcctaggcttgaataggaatgagccttggaaggtgcagagcttcgtggctcagcagaagatggtgatgagggagatctgacctgaacttccccagggcagcctgggagagcttccagaggcacaggctgaaaatcgtgagtcctcctgaaacttcctttcactgctcttgctccacactctgcatcagccccacccaccgagggctgacccccgactcttccagacctgtttcccatttctcctctgctggggccccccagtagcctgctggtatgctcatgtctgtggctcatgttgctggctcctgctgctgcctcctaccctgctggagacaggcaacactggggccagctcgtatgccacttccatgaagccttccctgatccctcctgctgggccctctcttcccctctccctccagcttgtggttctgctctttgtggccctcacatgtgcacttgtgctatgtatttcattgttttgaagccctcacagccacacagggcgtcctcattgtgttcttcccccagtgcttctcagccactcgggacagtcccaggtgaccagtccattaaagtctgaaaactaatccacctgtacctggagggagtcttggatcccaagcaagggagtgagaattgggacataatattgagatactaccaatgccaacttgggaatccttcctcgtatctgtcttgtgtgtttatagcttcaatttcaagacagaaatatccacccacctgttttgtgatgctaaagaagtatgcacactgaattttgggaataaatcaaaagccgaatgccactacctcctgcttgcttgtttaaaggttagcctttaggatctcttaacttccacaaccaataaaacgtgtttcctagtccttattatggccaatcatttccacattttgttagagtctgcagattaccttggcacgttaatcctgagttctgtcatcccaggcaaatacaaatgctcagaacaaggacttacgatgaaaatgttagtgcactccatcttccagctgcctgacaagcagcttctactcagaataagtataaattagctaatgctgaagctgcagaaatgtttaatccgtatcctgtgtcttgagtgattcctccctcctccccctattcattcagatgttaattctagatctctctgttgcactcagggttgaatctggtaaaatgctagtggtatggtacctgcaggaaggcatatataatttctctatcagagtgcttttaatgccctctttcagtgggcctgatacataagaaaagataaatgcttatgggccccaaaactctttggagtcaacacatgcatgagaaagtataatacctttttaaattttaatcattttagccaaagagcgaaatctgtttttactgcttatgagagatggtgctaaattaaatacgaggcagtgatcttcagaaaaagaagtccccacaaaaacagtgcttccccatgggaagcaagaagcactttaggaagcttagagtggggaagtgatggggtggtgggctggaggcagcctgaatgaagagaggaggcagagacagaggctgagcggcaatggtggagctgctgtaagacgatgctgggggctggcaggtggtctaaaaagccctttcctggatccctgtgggtgtgagggattaaagcctacaggtaaagcaactacaggcccctgccacacctcctcaggtgcttaaagagttgcctctgtgttcccagttgtaaatgagatcatctttggtgatgtctggatgataataaccactctttattacacattttctctgtgctttacagggagtaggttctttaatcctcccaacatccctttgcggtaggtgctgtaagtcattttatagatgaggaaattgaggtcttagagaggttagatcatttgcccaagaccaacagctagtcagtggtagaattgggatttgagcacagagacagtctggctacagagcctgtgcttaccgtaaccaccatgcttttaaatagcaatttttcctaatgaaaattgatagtgtaatgtccagaaggttagaatttaaaaaattaaaataaaacggtctctgtctcatggattcaccaggggacctgggggaaatgcccttgatcttggtttccagtctataaaagaacaattatgccattcttcacccacccatcctacagatgtgctttgaggatgaatgaatagattggtcatcagggctttgaaaacccaagatgattgaagatgcctagttaaataatatgagtaaatgagtttccacatccctgcacaagactcaggcccccaaactggagcagctttccagcaacagctggtttgagattttcaaagcaaatttcacgcacattctatgtaagtccaaaaccaaaatttccttgtggaactttcttttttttttttgcaggaaattcatctgacgtctcactgaaaatctctaaggcaagcatggtgccctatcagggatatggtttccagccttttgtctttttttttttgaggcggagtctcgctctgtcacccaggttggagtgcagtggtgcgatctcggctcacttcaacctctgcttcccgggttcaagcgtttctcctgcctcagccttcccagtagctaggatcataggcatgtgccaccacgactggctatatatatatatatacacatatatatgtatattttgtatttttagtaaagacagggtttcaccatgttggtcaggctggtcttcaacttctgacctcttgatctgccccaacccctggcctcccaaagtgcagggattacaggcatgagccaccgtgcctggcccagccttttgtctttaagaaccaaacattcttctcttgctggccttgaagagggagtttggtaaattgggtcagttaattctgctcccttaaccctatgcttgttagtggtcttcatctcttctacttactctattaggacccgcactgtgggaggctgattactgcagtagactccacactgatttccttacgatgtgtctgaaggggtgtacaaaagggttaatttgtatatcatgaaataaaaaactttcatcctttatccaaaccaaaaggaatgacaacaacccaagcaggtagtattctcatgtattttcccaggaaagttataaattcttgttgtaatctgcaatgcaagtagcatttttaaagatttcaagagacataaatggtcttgaaatgtagtcataaggggaaggtattttggaaaaaataacctgagaaatcgtctcatgtgaacataatcacacacacacacacacacacacacacacacatttgtagtctttgatatagtaatcttgtttctgagaatttatgcttaagaaattatctaaaatcaggaaatcaagagttcattgcatagttgtttataacagcaaaacatttgaaacagtcaacatgtcccagctacacacatgcacgtacacatgcacatatgtatatcccagaatatgcgttaaaaattaaaattataaaagccatgtagtaacataaaaatgcttattatacaaagaaaaaagccagatatataatcatgacaccataccagttacactgtatattttttatttctagctttttttttttgagatggagtttcgctcttgttgcccaggctggagtgcaatggcacgatcttggctcaccgcaaactccgcctcccgggttcaagcaattctcctgcctcaacctcccgagtagctgggattacaggcatgcaccaccatgcctggctaattttgtatttttagtagagaagggattactccatgttgctcaggctggtcttgaactcctgacctcaggtgatcctcccgcctcggcctcctaaagtgttgggattacaggcatgagccacggcacctggcctatttctagaatttctattcaatttgttttctactctgcctcttcatttttcatactgttctgtttattccttatggtcactgtttctttcactattttcttagtaccttaaacatacctctctaaatactttttttccaggttgttctcagggtagattctgtttgttgtgatgttcatttccatgggtcctctataaaattttcctgtgagctcctcgtcttctccaagggttgttatctgtaggactcctctattccctggcctgggaggtggcgatgttgctttgcctttgcaaaaccctagtaattttaacactcttaggcacatagtgcatttctgtaccaccttcctggaatggctgactgaggctgaattgagtatgaatcctgaatttgttgaaggagctcacttccctagcaagggcctaattgcatgcctgttgcacctttgggttcagctctcacaaaccattagatcccgcttgctttctggtacctaaacttcctttcctgccctcaaactctattgtgcattaaaaaataacttatcgccagggtggtggctctcgcctgtaatcccagctactcaggaggccaaggtacaagaatcgcttgagcccaggaggcagaggttgcagtgagccaagatggcaccactgcactccagcctgggcaacagtgtaagactgtctcaaaacaagcaaataaaacccttatgctttacccatcatttccacatgtttgtagtgggacattcatattaaccataagtacctatttatcttttctatttgctgcaactatatgaaaatatatatggatataatcagactggaaaggactttgaaaatggtatttgttatgggtagagagagtaggtttattgtaactctagtttgcaaacactctgtattaatatattgccttaaaaacaattgttataagaattatcttttaaacaattctcttctgtttcagaatgcatatactacaactgctattaatgggacagatttctgtacatcagcaaaagatgcattcaaaatcttgtccaagaactcaagtcactttacatctattaactgctttggagacttcataatttttctaggaaaggtgagatatcttgactaaataaaggagcctgggattctgaaaattaagccatacaacaattggtttgaaagggaactatatttcttgagtacttactctatagtgggtgctgtgcttcattatctcatttaatcctcaatcccatgaggtatccctactttgcagaagagaaaatgaaggtttaataacctttccagggtactacaataggtagagccagaattttaatcttagtcttactctcttacctgtgatcagttctaccattctgattccctctttttcaggtctaaaatgaaaatgctactaatctcagaaaatgaacgtttgtgggtttctcattaagaatatatggaaagagtattgaaacctggactgggcacagtggctcacatgtgtaatcccagtattttgggataccgaggcaggcagatcacttgaggtcaggagtttgagatcagcctggccaacatgggaaaaccccgtctctactaaaaatacaaaaattagccgggtgtggtggcgggtgcctgtaatcccagctactcaggaggctgaggcaggagaatcacttgaacctgggaggcggaggttgcagtgagccgagatcacaccactgtactccagcctgggcaacagaacgagactctgtctcaaaagaaagagggatggtttctaaaaaaagttttaaagtgaataggcttattttggtgttaagtgaaaaagcagaataaaaagcttgtgagatattattacatttatataaatacaaaagctaggcacagataaaattacatataaccttcctactcgccattaactgggtttccttttgatacagcttttcattttttcctctatttcattctgccaaaatttctgacaagcattctttacaatagtgcacacacacgttgcacacaggaacgtatattaaaccattacttgtaactgacaaaaacatctaagcaactgattcataaagattttcaacaaactcttcttttgcacaggtgttagtggtgtgtttcactgtttttggaggactcatggcttttaactacaatcgggcattccaggtgtgggcagtccctctgttattggtagctttttttgcctacttagtagcccatagttttttatctgtgtttgaaactgtgctggatgcacttttcctgtgttttgctgttgatctggaaacaaatgatggatcgtcagaaaagccctactttatggatcaagaatttctggtaagcaaacatttcatttccaattgcaatctccatgctcgcaatcttgaaagttttgtaaagctgcacacacgaaagaggctcatacccagcctctctcttctagagggctctgaggcttctactacccccgggcctgaaagtgggatttgcgctgaactctccaaggctgaacccacctccctttctgagaaccttctccctgaagaagtgaagctgaacaagaatgctgatcagatggattcctaagtagcagcagcacttcttaccctgggcagaagatgtcctgaacacagtagttcagctccctttggtgctcatggcatgatctggccttttgggtggtctagaagtttaacagttgatctttttctaaagcatttttgcatctccaagcatgatgttcatacccactatattagggagagcacacttgtgtgctcctctgtgccagtattgacagatctgcaattctcaggccctttattagcccaggcacaccagtgtgagaaaagccacaccctcagcggagcgcccatactgcttatatctggaaatagcaggcagctgtttgcaacagcctttgcaacacagttgttgcttatttgccttatcctgggtagacagggatattttaacagctgaatgatgtctcatctcttttccttgtctgagttatatgatatttgcatacttttctttcattctgttgccataaaaattaggtgttaaagcccttttagctttaaacagagcatttaatgcactctttggttcagcaggcactcaattttttaagaaccacttctacaatttataattaatgtatcctcatccttctccatataaaacataaactacaaattttacttttttttttgagacagagttttgctcttgttgcccaggcttgagtgcaatggcgcaatctcagctcaccgcaacctccacctcctaggttcaagcgattctcctgcctcagcctcccaagtagctgggattacaggcgtgcaccaccacgcctaattttgtatttttagaagagacggggtttcaccatgttggtcaggctggttttgaactcctgacctcaggtgatccatctgcctcggcctcccacaagtgctgggattacagttgtgagccaccgcactcagccaaaatacaatttttactttttacttgtttattgacttatttgtatgtactctaaggaaagtgcttatgatggtggtatgtagctagccaggtctccatcccctgatttacttttccagttaaaaatccaccttgaaatccgggcactatggctcacacctgcaatcccagcactttgggaagccaaggcaggtggatcacatgaggtcaggaatttgagaccagcctggccaacatggtgaaaccctatctctactaaaaatacaaaaattagccaggcacagtggcaggcgcctgtaatctcagctgcttaggaggctgagacaggagaatcgcttgaacccgggaggtggaggttgcagtgagctgagatggcgccattgcactccagcctgggcgacagagggtgactccgtctccaccacctcccccccaaaaaaaatccaccttgaaatttaccccttaaaatagttttttcaacagaagaaactttcttaaggatccagttatctgaaatttaaggccaagaacttgtaaatggctatcattgggactcagaaattgatactccataatatggcactttgacatgctgaactgaagaagcctcaagaactctctgaccttctcccaaagcacaggatgaagctgtcatctgaatgaaatccccttatctgcctaaagtccagacccaccaaagaaaaaaaccacctctggccccttccctgagttttccattaactggacttatatagcagaaacaaagactaaattcagtcaacacacctggacagacttttgtcacaaaccactgtcctgtgggcccaacagactttgttcccagccactaagtgttcttcaagctcattaaactcccctaaaagtaattcaccacccccataaaatcatccacacttccccatctccctttcccaaaaacagaattatctgtaccccatttagacactcactgtgattctcccctgtgctactttatatgccatttctcctgttaatctgccttttgtaagttaattcttcagcaaaccgtcagagggcaaaggagaagttttccctcggcccctacgttatcaacagtacagacacataatactattctaacttgttcttttgtttttcagagtttcgtaaaaaggagcaacaaattaaacaatgcaagggcacagcaggacaagcactcattaaggaatgaggagggaacagaactccaggccattgtgagatagatacccatttaggtatctgtacctggaaaacatttccttctaagagccatttacagaatagaagatgagaccactagagaaaagttagtgaatttttttttaaaagacctaataaaccctattcttcctcattgtctttgtcattattgtttgaccaggtaacaatactggaactatattagtttacctttttttgtacaaattaggacagaaaaactcttctaaaaccatgtttatatgcatcaacttacaaagtacactatgtaagaactgaggtaagtttgtaagtgcacaactaataaataaacctttttaagataaggattttgttagcagaaatctctggattttttttttttaaagggacagcatctcactatgttcccaaggttggagtacagtgtctatgcacaggtgccatcatagctcactgcggcctccagctcttaggctcaagtgatcctcctgcctcagcctcccaagcagctgggactacaggcatgccaccatgcccagcttggaaagttgcttttatacagagtaggatacttccctactcagccaatcctggaaatatgctaaatggattaacttttcaaagtacaattcttagatttggtgacaataaaagccaaaactgtatactctaacatgaactaccacctgaactgggcatgtacaggagaggcaggagtgtaaccaatgatttagtctgtgcacatgctcttcctttttttctgaatactcttcctcctctttgctaatggcaaactcctacttattcttcaaaacccagctctgatagcatcatgcttctgcaatgcctctgagcagcattacttgccctctcttctgtccttttcctccatgctcttctctgatatgactgtgaatccactttctgttatgtctctccaccagatcacattccgtgatggcacacacaatttatccaaactcctgatacacaagcactcctcttacagcagacattctggaagaagtggttttcaaccacagccccacctgagaaattacctggagacagatttttaaaaatacttctgcctggacctcagagatttatgtagatgggagtgaggggaagagcttttcgtttttaaaactctaaccaaatagaaacattttaacatgttgattggcagcctcatgggaatcaatctgacttaaatggcagggcaggtagtgtgatataaggcttcccttccctaaactttgaagagtcaaagatgacaaggaaagccttagaactcaggtctactttaaatgcaatgacttttttcttaaatgccactattgaattaggttgactccaatagtttcctttacaagcagtttcccagaagcattaaacctagtcattgtggaatgatgagcaaatagccttcacttttgtgggctcatcaaaccatgtgtatatactcctcatctctcagcaaaaaacagacggttttcgcccccaaacctaatagagccaatcctattagaagacatggcttggctgagacaatgtcggaaagtgtgagttactaattttcttttagtgactgcatttttgtcactatgacacctagctattgtttgtccttccctctgtcaggactgaaggtttatgtttcactataaaccctggcttattaccaagcagcacatcctatggctgacctagcatgtttcttattcatgtttacttaccctaagataggaaaattccccacccctcctgtcaatattcctaaagattttaagattattccaagttgaatttaagatgaatctgggccagccaagtcagtgaaataagcaagggtcagaaaatgattagaattctgtcatttactatgtgtaatggtttcctaagcctcaatctccttaagcatagagtgcagtgttgtgtgaagtaaataaaatgttaatgtaccttgtaacagtacctaggaaaaaggtacttaaaaaaaaatctgaccctacctatctagaagctagccagaaaataatcagcctgtggttcatatgaaagttcaaaaaaaatatttatttataaaaaatacaatgggataagtttatgctgagaaatgcagcaataaatacagttgaagaaaacagagcaactctacattgatacattggcacaaacaggaagagcaaatgcatcacccaggcctaaatgtccacaggccacttttgtacatgctcttttagaaacaccactctgaaaagatcttgttcgctaggtaagagaatgagtacacatataatcacaaatgcacactgatcatgactttatttaaaaattagcaaacaatactgtagaaacattgatatgtaaatttctaaaatgctgcatcttaaatttagttggcaaagaccacatttagcaataagcatgagtttagtcttccatgtagaaaccagatacactaaactgtaaaaaaaaaaaaaaaaaaaaaaagtttcctattgtttgaaaataccagtttaatataagattgtaaaaatgcatagatttttgcataaaagaactggctgtacaagagtactcccctttcacagtattcctttttacttcatatgcgagttattgattatgctgtaggatttaactattacagcactaaaaggcaactattgagggaagaggcagaaaaaggaaaaaggaatgtacgtaaggcaatttttcttaaaagtacaataagcttaatagtgttttaggaagacaagataaaaattactcaaggctagcttggttctcactgaataaaaacaaaggactaaatactgagctccttctgtgtggatctaataatcaatgccttggtcgctatattggtaatctctggggtagtcatcctggtactcgccatgatactcatcagggtattctgcctgataatcactatcactgatttccgaaccatttgttcctgttccttggcttccgttgtgaatgacaggttctgtaggagcagcacagtatttgggatcatatacttgccgcccaagcccatacacactcattcctttctgggaagcaactttgttggtacccatctgtagggaaattgtcgagttgtccaccggctgtaatgttagcttctgatcatagatgtctcttctggtacctggtgctaacatccctgcctggtattagaacatagtataaaagttaaaacagcagctagaatctattcttgtgaataatttataaattatagaattcacattgaatatgaacagtaatacatgaactttcatttggttcaggggtaaagctagcttaaccaaaatatcctgataccgaatcacttccatgaagcaatattcattggcttttgagctaggtgagacctttcttcaaaatccttgctctgctataaaattactatgtggcctcaaacacgtaaatttagctttaggtttctcaaactgcaaaatggagacattactacctactctggatttaagagagaatgagacataaagaatgtgaaatcataatgcttccacaccagaaagttccatgtgaatgcccatggggaccacatacattatctgggttaccaatttcaaaaatttataatatattcaacagaaactatgttgagcagatcttaaggacttgagtcttttcaaaaggctgagatacagaagaaccagccacttcacagccactcccctctttttcagagtacagtaactcatacttcatctctctacttacatcaagcacacacttccaggttcagagtgggtagaaaagtaaacgtgagtggcagctatgagagacataatgccgcacccggtaggatgtgttccataagggcaaagtttgataaatctcccttggactcggtaagaaaatgtttttcaaaccctatcccagctgttgttggatgtgagacctgtctgttctcaaatggttgttgaacttccttctgaggtgctggtgatctatttttaacaaggaaatatttctatcttggatgtggtatactggtattttcaccatgttgcatttccatctccttatattgacacatctaataggaatgctagttaaatccttcttagtggaacaccaggtaattttacctattaattaagggctccttaaaaaaaaaagtcagcatttaaatgagcaatattttacttggattttggagcaagaacactgtaataaacatatctttttttctgctggctaggtagaaaggccagctgttctaactgccaacaaaaaccacgagacacatcatgcttttgctgctatcgaaaaggtcttttgattattttgctttcccagcaaagtccacattcctgaaggaatatactctaaataaactatacaaaaaatacctactttaaacttctggttaataaaaataaggtaagtgtactcttgtacacgtataaaaaggtattgcttacctggctggctcctttattagtgcccatctgcagactaattgtggtctggtcaaaaggtttgtcagtttgcattttgggatcataaagatgcctcctagtcccgtaagctgtcatacctgcctggctggcacatttgttggttcccatcttttaagttaaaaataaaattgcacaaattatcagatgtcaacaatatacacaacacaaacaaaactttccatgctaccaaaaagacagaaggggcacaaccgacaagttactgagctgaggctccagtcaactcttctatgtgtctacaaacaaatttcaagtgctaactttaaaaagaaaatttaaagtcactatagataaaaactcatacatagaagaattaaacacactttaacaggtggactgacacaccaaaagtcattacagtggcagaataatttcctctgctactctttccccagataaccaaattaagaggtaccagcttcggttatttcaacagaagtaatcctaggccaagcaatatgctgttctactccaggaatgttttacataaaatgtgaaagcaaatgccaagtgttttctctgggagcttaacaagggctttttaaagtttcaaaatcaccaacattttctccagaaaggaaccacattttattcctgtaactcccatgtccttggacagagctggagaaaggtggaatgaggaatttgaactcagcaaagttcagggaaacaataattaatttttcttccccactgagaacagtatggcttcaggaccaaccattacaccctgttccactggttaggcacacttttctgatgttggatattttttctttaaaaataagattaaagaaaatctttattactaatataaaatctgttcattgaagaaaattcagaaaacacatataagcaaaaaggaggggggaaaaatcattgtgataccaccatccattcactgtcaacatttgtgaatatccttttagctttttaacctatgtgtctatgtatatatctatagatgcacatatatacaaatacatacaaaaacatgtgcatttttaattttaaaaatccatactgaccacagtatttgatgatctgatttttttcccccataacctatcttttcaaactctagtgtataattttacattacactttgcttttatggagttgtaattcaaccaactgactactgttctgaaatttaggtttccagtttctcaccaccaatacaattttgtactgtgtaaaaataaatctaacttgcatagactcagtagaaaggggcactgtatcaagcaggtacagtggcttttggagagtaaagccaacagcatttggggaattagcaatgacgtttccatgaccagtgaagagaacaatgaagagaaggaaaacatctgaactacgtatttcagaagaatttaaactgacaaattctaacagggcttggctgctatatcatgatttggtactgtaaataagtgactttggcattaaggtcgtgtaaaattgcctaatttggtcaataacattaaggaatttataaagtacatttctggctgggtgtggtagctcatgcctgtaatctcagcacttcgggaggccaaggcaggaggactgcttgagctccagagtttgagactatcctgggcaacaaagtgagatcccatctatatataaaagataaaacaggccaggtgcagtagttcacgcctgtaatccaagcactttgggaggccgaggcgggcagatcacctgaggtcaggagttcaagaccagcctggccaacatggtgaaatcctatctctactaaaactacaaaacttagccgggcatggtggctcattcccataatcccagctacttggcaggctgaggcaggagaattgcttgaacccaggaggtggaggttacagtgagccgagatcgcgtcactgcactccagcctgggcaaaagagtgagactctgtctcaaaaaaaaaaagataaaataaaaaatttaaaagtgtatttttcttttaaaaaaaaaaaaaaaagacaatatgattcaattaaaaattttcgtttcctggagaaataattgtcaagtcaggtggcatacctgaggtttcctctaaaaaattatcactgtcttatgggctttataaatagatataaattgtataaactacaccccccccccagtactatagtacttctatctattcttaggagaggcttaatattttgcatggtgagaattaatcatattgaataagtaattgaataagcaacaccacattacttacctgcagaccaattacactttggccagcttttaattttccttcatcaaaacgtcttgtttgtttttctgcatacttaactccaatgtcaatggttgtatggaatccttttgttttagcctagacagaaacatgcacactaactgaaaaggccaacagagtttcacagaaggaacaacaaagaaatgatatgtccatagacaaaggggcccaaactagagataaaaagtatttaaggctgttcaataatatactgcatcatttgaaatgtgagtgttctaagtaagctatctagtacgatgcagctgatgtcagcagcctttccacaaagctactaattacagaagagacaggccccgccccacctggtctgaacccccatgaaaaagcaatgatgcaattcatcaccaatgtggtgggaatctgttaaccagccattaaagacatgtacgtaccagacctgctagagccaccagagtagtctgaacctgggtcatgtttccattctcaaaaagatcatttgcttcgaatatgtcatgtggcttcataccataagcctgaatagctttaataaagttgccaatattctccaactataaagaagaagagttttataatttctggagctaaatattgacattcataatttctaagaattccaagtcttcataaacagttataagacgctgcccagaaagctgtttgacaaggattcaaccaaatacatactaagcatggctctctctggaacaggaaagagcaagaagagagtgtgtctctcactgtgggtcacatcacagtcttaatatttttaagcagttacgtgttttcagtttttatgggcaagatcttccttatatattttaaaaggattctgtatcagagctatccaggcctggaattttatttgtcaaaaggtatataattactcatactaataaataattcattatgtgttattttaatttcagaatacatttgtggttactaaatactcattctctcatatctccaaacacatgttcaagaccagtaagtatcccattttccttcctcatacacactcatgaactaaggttatgtctgatacagtgctctgcagtccactgttagttatgtggaatgccttgttttttcccttatccttaaggtctgggttgcatttctctgtgtaagctgtgtcaagtcctttctgaatgtacacagactaaatataggaaaacttctaagctaaacataataattacagaactagttaaataagtaattacagaaccattacaaaagggcaaaaaattaaatatgcacaaatttctgctacaatgtctatgtaaaaaccgtaatcaaaaagttaaaaaaaaaaaaaacacaaaaccaaaaaaccaaacctgaaatcaagttttcactacataaaatgcaaccaactagaaccagaggtggttggtttggctgttacctgaggccagttcagtgaggactcgttgaccttcttcactgagcctggctgtagcttgtttataagtctgaaaagaaaaatatgagagacatcttatttactggcacacaaaaacaaggattgaaatatcaagttgctccctttagcatcagtaagggaaagcattaaagatatctgtagaatatcaaggtctgacaccctgggctgagaaggagagtgagagagaaggctgtggaaagaactggaagagcagaaacagattctggagggctgtaactcactcgcagaggatgatgccatcctttaagcccagctggaagttggggccaatgctcatgcctgtcacctcttctatccaattgcgaagatcttcttctgcctgatgatcatacttggaagcaatctgaaatacaggttaactcactttagaagaatttcacaaaagcatcagaaactgccgactcacaacgcgctctgctttcactagccattaagaccacagctgtgaagtgtagtaaatgacactcaatagatctcaatggcaaacttaaccgttacaacttcagtaactaataacaaatttttggtgaagaccgtgtcatacaaaattttgaacagaccatggagaggctgggactgacaaggagagaacatcaatcaagagacatcagatttcatgatccacaggaagtgacaaggatttaatggtatgttacaatatggcactcaaactttaaggtttaagtcattaatcaccctattccaaaaaaagctggggaaaggattctgacacatgcagttattttacagagtatctcacctggccaatacataacattccaatagttttgttgactggaaagttctggtatttgccttctattcagccaaatacacactatatactaaacacacacacacacactttcctcagtactaattactgtacaatatttaaattctgtttatgtagtctctatcctattagacttcttacaggcaggaaaagcatctagttcattcagattcttagtatctagaattgaacctgacacccaaacatgtgataaaactaaaagaaagtttaactttttacttgcagaattcaaaaataaaggccaacttaccaacacaaatgctatgctattatacatggtaaaactattaaacataagttttgaaagatccctttttaataagaccacagacctcaatttaaaataattgaaaaaataaaatttaaacaaaatattgtgaaaaaaatcacatgcccaagttcttaagctatcccttgtcctggagtccccttaaagtggctggtcaatcagggttatggagaacacagctgaggcaggcatagtggctcacacctgtaatctcggcactttgggactgagctgggtggatctcttgagtcaggagttcgagactagcctgcacaacattgagagaccttgtctctactaaaaataaaaaattcagctgggcttgacgatgcatgcctgtcatcccagtgacttggaaggctgaggtaggaagatcacttgagcccacgagatcgaggctacagtgagccatgatcacaccactgcactccagcctgggcagcagagtgagaccctgtctcccgccccactgccaaaaaaaaacccacagctgggaagaaggaaagatccagtatcatttgtcttctcattcagcactggtgaaaatgccaagtatacataggaaatgctcaggagatagagatcatgagcttgggaatcaattacatcattggaaatgggaatgaaggtagaaatgtctgctgtgtccataagacatagggaggtttaatcattggaagaaatgaaatggcatcttgacattttagtcacaaagaagtcccacaagttccagtctacaccactcacggaggaaccaagcagaactgtgggaaatgccctaggttcatagtgccagagcatataggactgtgggctgcattcaggtcctttccaagggagagagcctgatcaccaggatcaggacagacatttacgaacctggccagcttacctgtaagtcacccaacagtgaaaaccaacgctgagtcttaaaaaacagattcaaagcgtacacttgatcaca

SEQ ID NO: 824 - DNA, 2390 bp, Homo sapiens
cagccccagccccggccccggccccggctcgcgggcgctgcgtctccgcgtacaggaggcggcggcggctcccagtcaccggcccccgccggcgagcgcacgatgcactgcctgggcgccgagtacctggtttctgcagaaggagcccctaggcaaagggagtggcgaccccagatttataggaaatgcacagatacggcatggttattcctgttctttctcttttggactggtttggtgtttatcatgggctactcggtggtggctggagccgcgggaagactcctctttggctatgacagctttggcaacatgtgtggcaagaagaactcccccgtggaaggggcccctctttcagggcaggacatgaccctaaaaaaacacgtgttctttatgaattcctgcaacctggaagtcaaaggtacgcagctcaaccgcatggccctctgtgtatccaactgccctgaagagcagcttgactccctggaagaggtccagttctttgcaaacaccagtgggtccttcctgtgtgtttatagtttgaattccttcaactatacccacagtccaaaagcagactcactgtgtcccaggctaccagttcctccaagcaagtcatttcccttatttaaccgatgtgtccctcaaacacctgagtgctactccctatttgcatctgttttgataaatgatgttgacaccctccaccgaattctaagtggaatcatgtcgggaagagatacaatccttggcctgtgtatcctcgcattagccttgtctttggccatgatgtttaccttcagattcatcaccacccttctggttcacattttcatttcattggttattttgggattgttgtttgtctgcggtgttttatggtggctgtattatgactataccaacgacctcagcatagaattggacacagaaagggaaaatatgaagtgcgtgctggggtttgctatcgtatccacaggcatcacggcagtgctgctcgtcttgatttttgttctcagaaagagaataaaattgacagttgagcttttccaaatcacaaataaagccatcagcagtgctcccttcctgctgttccagccactgtggacatttgccatcctcattttcttctgggtcctctgggtggctgtgctgctgagcctgggaactgcaggagctgcccaggttatggaaggcggccaagtggaatataagcccctttcgggcattcggtacatgtggtcgtaccatttaattggcctcatctggactagtgaattcatccttgcgtgccagcaaatgactatagctggggcagtggttacttgttatttcaacagaagtaaaaatgatcctcctgatcatcccatcctttcgtctctctccattctcttcttctaccatcaaggaaccgttgtgaaagggtcatttttaatctctgtggtgaggattccgagaatcattgtcatgtacatgcaaaacgcactgaaagaacagcatggtgcattgtccaggtacctgttccgatgctgctactgctgtttctggtgtcttgacaaatacctgctccatctcaaccagaatgcatatactacaactgctattaatgggacagatttctgtacatcagcaaaagatgcattcaaaatcttgtccaagaactcaagtcactttacatctattaactgctttggagacttcataatttttctaggaaaggtgttagtggtgtgtttcactgtttttggaggactcatggcttttaactacaatcgggcattccaggtgtgggcagtccctctgttattggtagctttttttgcctacttagtagcccatagttttttatctgtgtttgaaactgtgctggatgcacttttcctgtgttttgctgttgatctggaaacaaatgatggatcgtcagaaaagccctactttatggatcaagaatttctgagtttcgtaaaaaggagcaacaaattaaacaatgcaagggcacagcaggacaagcactcattaaggaatgaggagggaacagaactccaggccattgtgagatagatacccatttaggtatctgtacctggaaaacatttccttctaagagccatttacagaatagaagatgagaccactagagaaaagttagtgaatttttttttaaaagacctaataaaccctattcttcctcattgtctttgtcattattgtttgaccaggtaacaatactggaactatattagtttacctttttttgtacaaattaggacagaaaaactcttctaaaaccatgtttatatgcatcaacttacaaagtacactatgtaagaactgaggtaagtttgtaagtgcacaactaataaataaacctttttaagataaggattttg

SEQ ID NO: 825 - protein, 648 aa, Homo sapiens
MHCLGAEYLVSAEGAPRQREWRPQIYRKCTDTAWLFLFFLFWTGLVFIMGYSVVAGAAGRLLFGYDSFGNMCGKKNSPVEGAPLSGQDMTLKKHVFFMNSCNLEVKGTQLNRMALCVSNCPEEQLDSLEEVQFFANTSGSFLCVYSLNSFNYTHSPKADSLCPRLPVPPSKSFPLFNRCVPQTPECLFASVLINDVDTLHRILSGIMSGRDTILGLCILALSLAMMFTFRFITTLLVHIFISLVILGLLFVCGVLWWLYYDYTNDLSIELDTERENMKCVLGFAIVSTGITAVLLVLIFVLRKRIKLTVELFQITNKAISSAPFLLFQPLWTFAILIFFWVLWVAVLLSLGTAGAAQVMEGGQVEYKPLSGIRYMWSYHLIGLIWTSEFILACQQMTIAGAVVTCYFNRSKNDPPDHPILSSLSILFFYHQGTVVKGSFLISVVRIPRIIVMYMQNALKEQHGALSRYLFRCCYCCFWCLDKYLLHLNQNAYTTTAINGTDFCTSAKDAFKILSKNSSHFTSINCFGDFIIFLGKVLVVCFTVFGGLMAFNYNRAFQVWAVPLLLVAFFAYLVAHSFLSVFETVLDALFLCFAVDLETNDGSSEKPYFMDQEFLSFVKRSNKLNNARAQQDKHSLRNEEGTELQAIVR

SEQ ID NO: 826 - DNA, 118864 bp, Mus musculus
  misc_feature (1)...(118864): n = A,T,C or G
attttcagataatttagctttctgttcataagacgataatgcttccttcctccatccttccttctctccttcatccttactcttctccgatgcttcttgtcacttggaggtacaatgcttggtgcggacatgtgagaagaatgcattgtcccgactgaattcacacccctcgtgaggagagttaaaggaaaatcttcctctcagcctcataccccatcccacctggctctcacacacagaaacccaggggtgagtggagggggtcacagtggacacacggtctgaactgagttatgtctgtgtttggggacatggggatggtgggaggggacagggttgagtgatgtgaagaaggctgtgagatcgaggtagcaaggctggaaacatggaggacaggaatggtgggatggaccagggaagggagacgaggcataagcatctgcccttcctttcctccggacggcagagtgccacgcaaagcactgaatcagaatgtgcttggaaagctaaattctgcacagtgtaacgtcgtgtagattcagaaacagatgagatcccaattggtgatggcatcgttgaccaggacacaagttttgggatccttttgatgctcctagggaagaccttctgcccgaatgataattggaccaccagaatttcttcttaggccccactggtatagtgtgaatacctcagaagtaagaattaggctcctagatgagagtcatctctgtggtaaaatgattagctgtttctagaagggaaatgcacttggtgagttgcctgagaaggaagccgaggtgtctggactgattgcctagtcacctttctcatccctggccgggtagttgctctcctcccttagtcagtgacagagtcatacagagtggggcttcatcagggccaaagaatgtttttcctgtgtccaaaagagttggatgtaaagaaagcacttcatggccattgcttctgctgttccgctgttagaagtaactcctctgcttgtatttctgtgactctctgcccagccacagtacaagactttgctctcagcaatctttttcatattgaacacatgtactacagtaacatacactagtaggcaagtgctaaagaggactaagcaggaggatcgtgtgttcaagaccagactgggctatacttggtttaggatatagctcagttggtggaatgcttgcctggtgatcaagaagccccaaatgcagtccctagaacctcaaaagactgagtgtgaaggtcagtgtgtgtgtgtgtgtgtgtctataatcttatccctcagaatgtgaaggcagaagcatcaccaggaatttagggctgtccttggttatctagtgagtttgaaacatcttgggatacataaaacagggtctggtggacacagtgagagtcttgcaaattcacaaacactgtgacagcagacacaagacctatacaagatcaagccagccaacattctgactttagctgggggaggggctcacagggccctacccatgagaactattggaaattgaaggtttccagaaggttttcttttggtttgtccgtgctccagtggctgggtctgtattgtgtgcatgtagtgtcagtagtagtctgggctataaagagaaagaagaggctataaagttgggaggaactcataggggcttttgtaggtgttagagtggagtagggggtagatgtgataaaatacattgtatatatgtacaaaattctcaaagaatggttaaaaaataactaagctttcccctgaaggaagtgaaagaaagcattgcaggtgtattaatagctcatgggatgcttctctgtgctttgagcacaggtcagaaggttgtgcaatatcatgtggtacctttaaactcctcagtatggtcagtaagttccagccacaagaggtccctttcgagggaaaccagacaaaaccggacttcctgggacagcgacggccttaggcttttgtcctctggggttgctttctgctcagagcagtaatggtggtggtggcccttgagctccttctggccctgggttttgccttctgtgtttgtaatttctactgattaataagtccatgtcttaccatgatagactgacaagcaagcatgccaagttttttttaaaggggaatactgggctgaatgcatggtggtttctttgaacccccaccccacccctttatttttattgagaattgacctaagagtttcactgggcaccctcatggagactgtgttggttgatcggcttgccgttgttgtctcctccctcccctgcatagcctcaagccaggatcctccccaggcggatggactttttctcatctcccaacgtatacccacactccctgccccccccccccccattccacttttcgaagctggggtctacttatgggagagaatatgctatatttgtctttccgagcacggcttattccatgcgatgtaacttttccagttccacccacttttctgcaagtttcatattttagtctttctttatggcatccctagtgaacatcaagtaaaattccgcttgtatatataccactttttcattacctgctcacgtgctcaaatttattttattagtatgtaaccaccaaacagtttgccttctagcagggtgggtctaggttctatgggattacggagctgaggcgagaagccacgcctacttcatcacgtggtgcctgtgaatgctcacactaagacaaggcttccagtgtctgggagaactgcaggaggatcactttattttccctccctgctaccaagtctccctagtatctgtctttctaatactgggaataaagccagatttaggggaaatgaattaaatttgtccacaattactgatttcaaagtaagtataattactatgcaccgtgtcagtctcttaattttccatatgaattaggaatttgatatgttgacacactatgtttcaaaacctacttagagctggtttctgaacctgttctctgagagcattcctgttggcaagagtggtttggtggtttcaataggaatggcccccatatttaaatgcttggtcattagggagtgacactaattgagagggtttagagggtgtgaccttgttggaggaagcatgtctctaaggatgtcctttgtccaccagaggggtctcttctcctgcagccttccaatcccaatgtagaactctcagctactatacctgcttgcatgccaccatgcttcctgccatgccaacaactgactaagcccctaaaactacaagcaagcactcgggaggcagaggcaggtggatttctgagttccaggccagcctggtctacagagtgagttccaggacagccagggctgcacagagaaacactgtcttgaaaaaccaaaaccaaaaacaaaacaaacaaaaacaaaaaaaaaaaaaacccaaaaccaaaaaacaaatggtttcttttataagggttgccttggcggtggtgactgagacaaatggtaattaaagagtcggttaatgcacatgcagacctcaggctctgacttcagaacaggatctcgatgcctgcgtttatttttctcttcgtccgtgactgtgggtggggctaccagccccacgcctctattgcttatatattagattgtatatgcagctacagctatatcactcactaagtgtctgctaagatcgtgaattcacccctgcgtttatcctctccttggacttcagtgccacactgaccctgtggtgaagaaagggtggtctctggagtgactgccactgcggctttaagttgatgttcattagtcacgcctgatgacgtaactcatcctggctcttgatcatctttttccttcccatctatcagccatgccacctcaaggggaagcattccagaccaagcctggccctctctgtcccatgcatagaccccagtgggttctagagttctgctgcagattccccactgtgctctaagaactcttgcttgactcctttctgactcctgctcctccccttctgccatccttggaattgtttgtaaaatatttctttttttttttaagaattgccattgtgggagctggagagatggcacagtgagtggttaagagcacttttactgatgttgtagaattcacatttgatccccagcacccagatggtggttcacaactcctcataacttcagttccaggggatctaacacccacctctggcctctgtgggtggctcctgcgtatacttggtacacataaactcaatgtgtgcatgcacaactatgtgtaaatagaaataatttgaatgtttgtgtaggtatggttgtgtgggcatgctcacatgggtaggttcaagtgtgcgtgcatgcttgtctgtacatatgcatataaaggccaaagatgaattttgggtgtccttcctctgaacctactaccatattactatctgtatgtttgtgcatgtgtgtgtggtatatatattggtgtttctgtgagtatgtgcacaaaggccaacctctggtgtcttcctctatcgctttcatcttactttttgaggcaggatgtctccctgaacctggatctcatcgttggacaagctccatgatgatactctctctaccctgcccctagccccttagctggagttatagacttatgccaccatgtccagctttttcaatgggttctggggatttgaacccaagtctccatgcttgcgcagcatgtactttaccaactgagccatctcccttgcccctccacccccagcttccttcctgctgagactggttcttaggttggtgtggttgtgtgtctgagccccaggaatcatcctatctctatctcagcagagcttggattacaaagccaggttgctacacttaactttacatgcatacaaactcaggttcccacatttgcaaagcaaacagtgtacatcggaatctatctccctagccccaagtcttgaccatatcaagaattcgacaccagctttctaggttctcgcccacttaatttccctgcgctgctcttgtttgacctttagtaccctctcgctgattatgtcagcgattccatcagcagctctgcagcctcaggctgccggtgacacggtactgcccgagacacggtacctcctgtttcatgctttgaagttggttgagcatcatgtctcaccacggcactccacctttttatcatgactttcctgacccctacctgacaaaaaccaagtgtgacttccccagaggccactgtcacttagtaagtgggacctgtcagaacatcattgttgacgcaacagataaggagaatgaaggttttactcatacactctgagctctgctagcatagctctctgcaaatagtatgaagatttactatattcatcaagaagacaatttggagctggacaacgatgagaggctgaaccgcattgatgatgtgtttcaatctgagagagaactggtattagctgggatcacagatgagcaacaggcggggactagccaggctgtgaggcgactgaacacgcacaaagaatcaaattgtcatttcatttcaaatttattattgggtaaatgacagcataggaagaaaaattaacactcatcatgatatgtagctactttggatcattatgcagtattatttcagtagaaaaacacgctatctctctggttatcgtttatgaagatgtagttctgacaagcagttagcaactgatgaggttaataaagtttgcatcgaatggggaatgattaattccgggctagggaggataaaaacatcacttagaatggcctgtgaggtcaacaggtgcacacttctgggactgtgttctttctgtccgtcatgaactctccgtggagtctgttttgaaataggcatttctggtataaagtctgatgaattacattccagctctagagagtgagcagctggaatgtcacattttttgatgtagatttttttttcagtacagagaggattaaattctaaatgtctcagctgttagaggccccttcagacttccaaaaatgaagaacaaaggagtgaactttccctaaagcaattcatcagagctacttggactctctggcatccttctcgagctgctaaggaggagttgccccgagtgattcaagggattgcagctgcttgggatataggggaaagatgtttctagtcttcatcacatggccatatgagagctcacccactagttattatccatcaataatcaacctttgggagctggggagatgggtctattggtaaagtccgtactataagcgtgaacaccggagtttggttcccagaacctaagtaaaagtaaggtggcacagcacgtccccctcataccaggacttcgagagaaggtagagaagacagctgtggagctgtggctagctagcctggtgggatcggtaagctctgcctttagtgagggaccgtgcctcaaacagtatgtggaaagtgatcaggtcgaatgcctcatgtgacctctggctttcatgtgcgtgcacacatacacaatcacacacacacacaaaagaatctaacaactatggctccccaacgttatcttccactatttaagtgtccatttgtaccacgactgtgcggtacctttaacccgagcacacctgaccttagaggaagggtcactttcacgttttgtttgttccgtgcatcatgagacgtttgctgaaccagcctttcacaccatgaagctgacaagtcctctcacgctggttttctccagtctaatgggtggctggctgttttatcttaaagttctgactgcttcggcttcagcagaagcctgtgagacttaactcccgagtgtggactcactcaacatggtgatgatcgcatatcaaatgcagaatggactgttttatcacctgcttagcatcatctactgcttgtggtctactcagtagcctccttatcaagtttctgatgaaactgtggcccatccaattgctcttccctctggctgtcatacccttccatcttaccgctgctcagtctccctcctctgtgaggacctggtttgaacgtcctcagctcagacaggcatgaccacaatggcccctcctataaccagcacacctctgtttctctgggctcctcactccctcgtgcagcctcccataaccctctttgacacttggtatttccttatcctctctccttgccagatgcattgtcgtgactccttggagcctgttctgcctgattgattttattttctttcccagtctttttcctagtctatgtggggtatggagtccgaggtgtgactatattcatgtgggccgtgtgtattggtgttcacttcacttcctcataccctgtaggtcttctgaagacacacatacatgcttgctgcatggagctctgtgtgtgctggagtgcctaagccctgatcttcactgtggccatagtatggtagaaatgaatgctagagaatatacatttgggtcaggtcttgttcttgctttgcagagcttaaagttacaccttctctggtgagttttaggatgctttgtgtcagcactgtgagttactttcctgccgaacagtagtcgggatgcgttagcccgagagggaaagagcctggttgtcacaatatgacagaagtggagctggaggtctgaggcgtggaaagaatgcccatgacgcgtgtgaatgcagttctggggacagcagttctggggacagcacagaggggacgaatctgcttcccacccagtcacccacccactctttgttcagcctagctttcctttgatggtcccaggagacagacacggattcaaggggcagaggcttttgccgctgtgacttcatcgtgttttgaagtttctctcggaaatgattgatttatttttgtctcttgtatgcattatatatgcgttgctgttgcgagtgatagattccaaagggccctgtatgcctttgtccacagacacccagccatgcaagttcagcaactaagagaagcagagtgtctcgctgggttcagaagtagaccagaagggaagcgcatctgggtctcctccatagcagctgctggtttggatggtgaccgggaaagagcagtgctcttacctgtttatgtagtgggtgactgctctcttcgcttttatttagccattcttctggttcctgcccctttaacgttgtaagatccatcacctcatttacgcagttaccttgacacgttgcaggcttgtggacatcatgattccacagcagagcaaattaaaacgtttcttcatgattagaaggttaaatgaggtaaggctgtggtggttagtggggagataaggggttctgaggaggcagagctcaggggactctctggtgattagaaaattaggctggctagacggaggaatgtgggttttacaaattgcagacgctgagcaggaatgaagacttgaggaagtgctggtgacatctgggtgctggctccatggcctgagctggaattgtggcccaggacatcaagcagcagcgttgttagcagcattgttttgaggtttctcttcttccttgagaaattctggatctaattacaccaggaagcagtggtcccaaaccctgccatgatgagagtggaagcctctccttagaagcttcggttttccttaagcttgaaggtggctcggaggtcaagccccgtttccagctggcaggagcctttctctgtgttagtaccttgccagtcacggctgctgtttgtgaggtctgactgcagttcccgtctctgttcctactccagccttgattttctaactccatgactgctgaactttctggtccctggaaagtgagcacctgggaagccaagggctttatcacctgactcccttggatagattctgtgaccctgctgtcttccccaagattccctctaacgtcgcagctgtctaggttcaagttcaactctgagtgttgtgtttaccattaatgttctgcctaatagactccgggcccttccatctaaattgaggctcctcacctactacttgtctccactgcttgctccacttccgtcctttgtttgcaagacctctatctgtaccaagtggactcctactcgtgtttaactgccttacttcgtctgctccagagtaccctcaattctgagcctccatgacggtatagccttcacccttagaaagaccgaacaagtgaacaacaatgcagagtctgctttggctctctgctgtctcctggactcagagtgcacatcttaccctggtactcatggtggctcattgtagttatcacttatgcttatagctttccttctgtgttctgcacggtaagagagactgattggttcctaagaacaagccatgttttcttgttcctcccatctacaaagatctgctcacatgtctctaccaatccaaacgtgtgttttatcaagctcggtctcaagtattgtatccgcaccctttctcaccccagacagatgcaggagcgccagcacaacacccaggggacatgctcttaggcgatttgctgtgctgtctttccctcttctggggcttaaaatttctaatttacattgtgaagttttctgtggctagaaaccactaaatacagactcagaagtgtgaggtgggaatgaagctgggtcagccaggatgtgatggagttatgaatttctctcaactgtttgctgcgtgcctgtgtgactgaaggtgtcatactatgcagaaggcatggatacgaagagtcatgtgacaaggcacatcctagagcttcaggaactgggaagcatgtgagagaaaaggaattgctgtaattatgctctgaggaaagtgcagcaacaatgcctttaaagcagagagggaggagggtgggactttatctctgctggggctggcaggtcgctggtgaaaggctggtgatagggcaggatctggggggttaggaaaggtggcctctggatggaaatgtctgagttgaggttttcaactgaacaggagcatgcaaaggtaaggaagaggaaggctagaagagtatacgaactctctgcctgctccctgccactggcacagaaaggccacccgcttgacaaatgacttttttccccctgctcgggctgaaatatcctaaaagggagaatcctttgattcttctgagagagaaagagaggggtgccccgcccctggtgcgcgagctggaggtcattcactctccttgcctttcttctccactgttttgcagaggaagcccgtgcttgtggtgagcttcatagccctgtgcatcttgctgctagccatgcgccttgtcaatgatgcgactttccctttgctcctgaactgctttggacagcctaagaccaaatggatccctttgccctacacattcaggcagcctcttcgaactcactatggatacataaatgtgaggacccaagaggtaagacctgagagggttacctaggagggtaaccatggcaactgttttccagtaggagcaagatggcttctgagtcatcacatgtacctgttctgtaccaatgagaatttttttgggtccctgacaacattttctgttttcttattcttagatacttctgacacatgtctgaaatctttcactccctctcacatcaaaccgccaaatccctggcttcctatggagctggggaagcaattacctgttttcctggtggtttgaagcttcacatgcatagctttccatttagatgctctgatcagtggccaccggttggagaactggctggctttatttcctgtaggtcacctagttggggacagctctttatagaacccgagaaaagcatttgtctctttataactctgtaatccttagacctgcagcaaaaaaaaaaaaaaaaaaaaaaaaaaaaaaaaaaagccaagctgaattttaacattggcagtggctgcagagataatgggatttaacacctttctacatttaaaagggttaaaaccatttaaacccttcaatctctgaacttttaaatcttcatagccaattggtgtcccaagagagagaaagtagttgaatattggcagctaggaagagtaccttaggctagaagtgtgtgcttgtgtgtgtgagtgcatgtgtgtacgcatgtgtatatatatatacatgtgtgtatgcatatgtgtgtttgtatggatgtgtatgcatgtttgtgtgtgcatgcgtgtgtttgtgtgtgtgtgtgtgtatgtatgtgtgtgcatgtggaagccaggagacaaccttggtcagttttaggatgagatccgaaggcgctgtccactttttatattgttttgagtttgagatgagttgtctcattggtatagacttcaccaagtatggcaggctggctgactagggagttccagaatccaatccagctcttcctgcctccccaaagctcgggtcccaagtatgtgccaccaagccaggctttttgcttgcttgcttgtttgtttgagaattttatacatgtcaatatgttttgatcacatccactccaacttgatgtatccttttaaaaactcactgagtactgttggcttgatcatacagtactcatacctctgtgttttcttgtgtaaagtggccctattacattcagaaagcactgttcacggatgtccatctgacgttttttttttagtgtgaattcttgggaattacaccttagatgctcatgctcagttggaaagtatttactgactaagccaaattccccatctctgtcttcagagttttaccagcaaacatctctctcagaaagtacagtagggggaaaatccctcaaaaacatagcgaagcactcagagggagtgagactgtgtgcacagacatttccatgtgatggggtgagtatgagacacaccagtgttggtgcaaagtccaaggctgtttagagttgttggtgacaaaggtacactgtatcatgccacacaggaggatttggtaacagtaccctggtggagaactattctgtaaatagtggagaggggcggtgtcacacagctcctttgtggccagtggcatgcatgagaagttggtttctctgcacttcactctgtatttttgtatctcctggatttatagactgtttattaaacctttatggttaagggaggcaccattaataatatataaattcctcagagtctttcttggtgtgtatcctctaattggttttaaattaacttttggaagtctgttgcttgaatttgttgagtgtcctgataaattgattacctgtattaaaatgtgtcttttagagaagagcttgcctccctcctgtctctcctcacttttatgtctagctgtcacttaatattctataactctgcagtatgggttaatcatttcacaagtgcctgtcacaggctgaagatggaacacgtggataaagtatttcgtgaatttacactcacgagaaacatgccagtagatagtaaaaccccttgatttctctaaatatttgtggatcaaattttggagtagtccagccacttcctcctgttgatatagtttccttcctacctttgctctcatgatgcactgtgcccccttaaaccatgagtcaaaataaatcctttgtctcttaaatttcatattttcagttatttggtaacagctttgagaaaaagtaactaaaacagtcctggtgtcatgtaaagctacaattaaataagttattatgctttatttagggtagcctgtacattgatgtgggtgtcagtcagactctttatgagggggcagcaaagaggactgcttccctttctgcaccttcacagggtctcaagatgttcattccgctccctctctcagttctctgactttggtccctgaagaccttgtcatcctctcctgtactcaacgcactcattgacggcaggactctgcagaggccatcatttagaaggaaccggtgtgcagctgtctccgtgtgagtgtggatctcacaagggcataggtaatgtcttgaggtcagagacgggcagaggaggatgaaagctactgcattctgacgccctcccagctcttttccaaccagggtaaactgaagctcctgttgttgagtgcaagggggtcttggaggtgagatgagtcccagtaactcgaagaaggctgagttctgaagtccctgctgctcaatgagcatgcagttcttgccagcactgtgatggcgttggctgctcccactctgagggagcaccaggctgcagaagggactggaatgatgtggatgttgcagctgtgtcccctgtatcccatagatggctcataacttctcaggctcctctaccatctcatcatcgctatccacagtgctacctcactgatagaagggtttatagtccactattgagacaggacaggaactcaagcaagacctgaagcagcaaccactgcttactggtttgctttccagcttgctctgcctgccttctttacagctcagccaggctctgccctccctaggatggctgctgcctacactcttcctaccagtcaccaatcagcagtctttcacagatattgccacaggacaatctgacctgggccatttttgaatcgaggttccctgtttccaggtagttgtgtcaggttgacaatagaaactaaccagcattatcgacttcttaccaacccgacacacgcacttaacattgcccaaacataaccttctccttttggtttgtccccaagatatcctggtaatatcatactgtatcatattaaatacaatagaacttcaagcatcccatagtattttaaaaattctaattcaagactaaatggaaagagctgctctatgatatttggtcagagtgttatcaattgacattgaacgtgattttaaaaagcatgtcacccgtgggtgctttaaaatctcacgcacatgtttaaggggtggagcaagcaaccagttgacagggagcaaacataatgaagtagaaaggagggacactgagttaagggtatttaacagtgacgaagggagggagcttttccctgctggatgtctgcggagtagggaggtcacctgggtgcatagcatctggctcttgaatcttcatttggttatttgaacatctgggattttgttttaaaaataactagatagggcaagggtcaaggatcttgatagatcaggatttggctcagcttatccttgctctttctgtagagatcatggtaaatgagggggaaagagacgttctctgtggctggattctgatctagtttcctgccatagggtaagtcactatggtgggctttttttcatgtagtgtgacatggtaggaagccattccctggggaaagccacctatatagacctttcacattggctgcttaagaagcaagcactgatgaccacgggaggcggtagcatggcatttctggttaccagcttcatggcagacatcttccccagaggtgataagagaaccagaatgtggtagagttgggaggaaggctggggaagggaagactgccctttcccatgatgctcagggagaagtccagacatcagaatgcagcagccaaggacaggactgtgctttcagactcttactgacttaacgaggcagaagtgcctctctttaatcacagagactcttagcctcaagtagacaaaatatgaatactttgtatcagttcctgtgacagacaggccctgctggtctagttagagatgcacataacatattgatggtgcaatagaatttcctaaattgtggttattgtaacaattaaggaacaaagctgactttcttggcaataaaagaacatgctcaccacattcaaataaatgtgtgcttgtaactaaggcaggcgggaatgggtgttttatgcttgggtatatacgctttagattttacataagtatatggagagcaattatatgcaaatgtattctctcaaaactttaaactgatcaacttaattgttagttaaaatttgaggactcccatttgtgtaatggtaaataacaagtaatttcggctcttaagttgctttacagaaagaaacaaattaatgcatactaaagattacttatttgacacatacacattagatttgccgttttaaacattatcatttttccaatggctcgagggcttgtatttgttcagtgcaagaagtatgattttatttcttacacaggttgtgagatagcaacgctcaggaaaaaaaacacatttcaagacaatacataactaaatgcaatccagagggttgacatctctgagggttgagataactccagggcaattttgtggcatatgagacaggtaccatgatgcttagttttaattgttaacttgacagaatctggaatcacccatgaagacagtctccttgagggactatgaagattgtgctgatgggcggccacacctgttttcctgttggggttcactcagatgggaaaacctgatgtccacaccgaagatggacagcaacatttcattggctgggccctggacttgatgtataaattcatcctttctctggccttgactgagcatgcactgtgaatattaggctgcatatatgcctcgactctggggtgcccaaacactgctcaggggcgcagaacacagtccatgatagggagcccttgcctgttttttttccccgatgagaaccagctggctctggggtggctgctgtggttccgtctcctgtgtacccagggaattgagggggattgggaacgggtctgttggtctgcgcttttcctaagtgtcaggcaggaagtggacaggggtcaagcccagtgaccacacagctgtcacttttattcatgctctgttctgtgaccttaacatggaaaaagcaccctatgccaaggggtccagaaaggatgcataatcctatcattttccagagatggaaattaaattcacactgggtaacactgggccagtttggctggagtcagttataatctgcatagttatggagatatagactctagctatgcagttacacagactatggaagatgaagatgggaattatgacctagggtgtgaatgagatccttggaaagggaaaggtcacatctatactaacaagcagtagtacatatatacagagaatatgaatatgtgtgtgcgtgtgtgtatccatactcactaaccgcatgcatatctgcaatacattcatgaacctgcacttacggagtgatttccactttcctaaataaaaacacgtgttgtatgggctcatacacactacttgatggttaaatcatgtaagttagcctgttgggtataggtagtgcctcctgtgcctacctacctattacttctctgttatggtcagctcttgcctgctgaccagagagctgaccattaattcagatgactgattggaaaatgaagccattggcccaaggctcaagaagaaccattctgagccatttacagattttcattgtatttttctttgtaacactgttgaccagagctgtattttcttggggtggtagaatatttggaatatgagtctctggaaatcttatcatatccccagagagagtgagaccgaaactctgagagcagcagaaatatgtggtagaagaaccttgaagcctgagatgaaattctaggtccagagcacagccaagcaggaagccagcctccccagtcctgtgacttatgtacagaaaccaataaacgttgttttctactttggctctttttgttgttggcaggcaagaggtgtagcaatcccttgttgttttctaactaccccagaaccctgtagctcatgtttgaataagttgccccctggaggaggacagcagccatctttcaaagtctgaactctcaaacctgttgggaggccgagcatcagaagtcagtcagctgggtggcctcaggatgtgcactgcggcctctgtgcctaggggcatgttgcttccttgacacaatgatcctggagggaagagaataaagactgcagagccagacagcatctggacaagcctgaccacttactgcctctctggccatacatacccagctgataaatcatgcagtcataatataattagcaggtaaaatggtctgtattgctgaggcaacagaaacccctagagattgatgctcactttacatatcgcatctgttatggatgaaagatccattagtaccgtggtttttaatatagtaattgtttctctgggaagatagaagggaattttattcattactgatctttaggtagagaaatgctcatttgccaactgtcatgttaccatgcttgaaaggcacctattagaaattcaaatatcgtatttcatatttcttcatttgtggcaaacaaaggaaaacaaaactgttcacccatcacggataccttgattggaggatggaaaatgtgactgacctgggctcctggtggcataaaacttttgttttccttgagttgatcgtctggctaagtagcttatacagaaatcatggatcaaatggcatttaaaggaccacaggtgctagccaacccacacgatttgatgagtgcttcttttattctacccaaatatgccaaaggtcttaacgaagtttggaaggagaaattcaccaaggaagaaactcacattctgggacaacaccatcaagaggttggtgacatccaggctgtaattggtaaaggttggctgagtctcttgccttgcataacataatcattccatagttgttaagaattgtgaacatttacataattgcaattgaacaattgtgtaagtgtctggaagacaatttgtcactacgtagatgacattaaattatgatttctcattttgcagaataatctatgtggaggaaaacatccaattctaaatattttgatgcaaaagtaaccacgcagttcccaagccaagagctgtctgacaaagcttgggaaatgtcacatgggttcaaatgggcttcttcactaatagacagttccccccctcccacagtggccatgatttgagtggtgtcctgaaggctttcaccagagggactcaccactgggaggcgctgtggagctttgggacatggatctcatgaaagccttcaagttcttggggttctgctcttgaaggagattgctagcccaggtgtgctcctccattcctacatccttgtggccatgcagtgtgtagtttgctctgctgaggtggactgttaggggcctgaggtatggcagtgcatcatgacagaacccgcatgtaccagtcttagatgggaagctccaaaataaataattgttttctaaaagttagctaccttaagcattgtattattgtaatatgaagctggtgcaccaattatttaatacatattgacctcaaaggaaaatgaaattatgaattgtgatctggttatacatagtttaaggtaatctgacatccttctgctataagccaggacatgatgaatgaaataaaaacacattagctaatgcccagcagccattgcctgaaggaatggggctcacgggtaccagcagcttagagtggagaggagaggagaaccacaggtgtgtggcttcctggagctgtgtaggatgaagtgaggggactgggaagcatcaacaggacagggcagacagtgaagccctgagatccaccccagtccatacactcacccaatgccggggactgagagtctgcaaacggcacagggacagacagacaaggacagacagataggcgtgtttcttcaacatttgcattttggataagaattatctgtgaggattcaatgctctaggccctggtggtctccaagttggaacttgactatgtccatttttctagcaccccagaaaactgagaaaccaacccagatctggcccctggccagagataaactgaggccaaggacattgaaaagtccggtggcctggacacaagggcccctctgccgcgccgtccagactcaggcatgcacgagagcagtgctgcttcagcctcgtgtgctggagagctgctgtcgtctgatcccagagtttccccgcccggctgtgggtttccataattcactaggtggttgctctggtgccttcttcaaagctgatcaattctgaattctagaatgcacctggtgacagaaataaataatccagacctgtgcccaaactctaaactgaaaaagaatgaatccaagtttgggaagcaagagtctagtagggaaaaaatatatatgtatatgtgtacacacacacacacacacacacacacacacacacacacacagaaatggcatgaatgtacttataaacaaacaccactgtcacagtcaatgacagtgtctgtgtccagaagtccatagtgaggacagactcttactgatttagctaattttccaaggctcaaggtcaccttggtgaccctgtgtggacaaaggaagtgactgagtttttactggtcagccttttccgggaaacctcagttcatgaagtgcctaagttcatggtcatggctggatgtcctatgtgcaaagtcctgggtttgtaaagaataaaatactccctctccccaaagctgataaccatttatataatgctatcacataataggtgatagagtaacgtaatatgtggagggttatttcaacttttcaaattcagtcctagatttttgggacagtacctaagaatattaactgtggcattttaagtctctgttctaaatctggtgtgatatttttttcataaacatttaaaaattttttccagagaaaatatttaaagcaatatctatgcatgaaaacactcttggaggtatttctaacatcagaactgtagtctgtctagacaaatatattattcataataccttaaagtgagtattttcgagctctttctaatgatctccttccaaaaaatatggaaagtagaaaagtataagttacagtttgcacctgagaaataccacatgaactatgtgacttgagttaacgtcaaggtgacaaatgatgccagtaggaagttaccttgggcagattttgtagtgacagctctttacctcgggccattttctcctgactaatcatgagacaaacacgagagaaatccaaatgaggggcattcacaaaacacatagccactaccttccaaagacttagactcatcaggaacaggagagtctctgtcaacctgctgggaccaggagggtcctaaagaagtgcagtcaaattcagcacacatcctgactgggctcccggaaccaaaacagtaggtcaggactaagtacactggaatcttgcccttccgccgaaatcaagactgtaacagttattcagtgcagaatcatcactgtgacgaatgttttctatagatactgcctgagaagctggggcaggggcttttgttaagtctctgcagtcttttcaagcgtcaatcaaaaattgctcaaaccggcttagatggtgtgtgtgttgtctgtgtgcatgcatgtgtgtatatgtacaagagtgtgtgtgtgtacaagtgtgtgtgagagagagagtgtgtgtgtgtgtgttctccttaccccttcaccagctgctgggtccacacttggctatcacagtgaggcagtgaagttggatgaagtcccctgtggtaggctgacttagaatcctttgggcatagactcaggaatgactctgtttgtgttctggccagccatccttgtggattcctctcttcccccacattgccattgttttcttggtgctcgctgggtaagcctggaccttactgcagttttgatttgcattgccatgatagacagggatattactctttatacacttattggccatttgtattccatttttattcttgtaacttaatgcatgtataccatgtttttagattatatccaaaaatatatataccacgtgcctccttcaaaatctttctgaactcctacatgtgcccactaattggtgtttaacttctggagttctttgttgagtctccatatgaattcggtatttggtatacgattggtaacaactcttcctcgtcctgtgtccggtgcccttacctcgctgtctttcccatggcggtgcaaagcttttcctttcatacagtgccctttgtcaacgtctactctcagtttttgagctatgtgggtcctttccagaaaatcgttgcctatgctgtctctttcctctgcccctttcaactctcgggctttacatttaggtctttggttcagtttggactggttgtcaaaccctgtgaaagatagggacctgcatctgttcttgaacatatgggcatccgttttcccaaccccatcttctttttctttagtgcatgtgtttagcatcgtactaaaagcgtgttagcagccctggggatgtacctctaggtcctctgcctgattctgattcctccggtgtctgtctgtgtgtgagccagcagcgtgctggtttgggcctcctgcattgctttttctgttcaggattgcttggagtctttggggtcttaggaaattgagggctgcttttgcaattctacgaggaatgccatggcggtcgaggatgcacaccaagtctgcacattgctttaggcaccgtagctgttttcacaattatcaattcaaatctacaggtgggaggacctgctgctgtcttccagtgtcttctttctcttctctctccagtgctccgaagttttcattgtagacatctttttacggccttggtgagacttttttcacagggttttgtttggtaggttttagttttatagatgagctttttacacccacactgtcttaggagacaggtactgggacatgggaaagctatgttcgtcacatgttggtcctgcattctcagtttttcggaaaatgtttattataatggggatatttctaatcgagtctgtagggatgttaaagcttaggttcatgtcacctgcaaagataattttactcatttcctgtttgctccagtttcattgttcttttctctaattgtaagctctgtgttgaaggacggtggagtgacaggaagctcttggctcctgcctggttctgcaggaatcactgtctgtttagtttgatgttggctaaacgttggctggttggagatgcctttactatgctgaggtgtttttccgtgtttcttgtattcttactttctacctggagtttatcatgaactcatgctggcctctgtcaagggctttgggggtcatgtgatttctgtttctgaacctatgtatgtgctaccttgcatgtgttgatctgcctacacaagacttgcatcctgtaatgaaaccattttagtcatggttaagacattttaaaatgttgctaaacttcgttggcaagtattttatttagatggtttgtatcagagtgatactatacctatagaatgagtttggcagtgtgttagtttcctttatcacagcacattgccatggtatagtacttagacaaaaccagcgtgtggagaagtgcctcctttgagcctacacttgaaggcctaatacactatggtgggggacagcttcaggctgttgttttcacgtgaccgcagtcagaggagagagggcctacatcagcacttagcccgctttcactgttttacagagcccaggaagtgggcctgcccacaattaaaatggatcttccgacactaattaatgtaatcaagataatccctcacaagcaggtgcagaagcccacatcccacaagagtctatatcttgttaacgattaaaactaacagttgcaggcagcggccttcctttcggattttggggaataattcaaagccccggtgtatttctttaaagatctggtagactcttcagggaatctatccagctctggggttttctttgttagaagaatttcaccatttcagtgttgtcacttacagagacgtgcttaagctgatatcctcctggtttaatttccattgcttataggtacctaggaactaatctcttctactttctcatcgtttttagagtctccctcatggtcctctagattctgtttctgttgcagtgcccaaactccatcattaattttaataaattgggtcatttccttcttttgttagcttggttatgagtttatggctttgtttatctattcaaagaacaagatctctgtttcattgattccttgtattgttattttagtctccattttattcatttcttctaccatccttattatttatttctacctaataatttggctttttcttatttttataaaaatctggaaattttcataaaattatatatttgaagtctgtctttttttttttcccagaaacactcaaatctatgaactcagcattttttttgtgtgtgtcccagtggttctgataaagttgtggtctcattttcatttgattctagaacttttaaggatattcttggctcactctccagtgacccactaactatttaagtgggtattattcaatctccaagcatgtttttatagtattccttgctgctcacatctacatttattctaccaagagctgagaaactacaagaaattatcttgattactttctgtatttgttaaggtttcctttatgctctaaaacttgatttgttttacagaaatgttcatgggcagcttagaaaaaaatgtatgtggccgttggatcactagtctatagagatctgttaagtctacctgatctgtcatacagtttaatgttgaagtttctatgtcagattttttctatataatttattgatgagagttagatattgaagtcttctactattattgcatataaacttaattttcatattttatttaatagtatcattttattaaattagatacttcagccttttatgcatgtcttcttaaatcactgtgtcttgttatatagatttggaactttggactgtttaggtatacaatcccagtttccaaaagttgtctttttccttctcatttttcaacatttgttatgttgacaagagattcctaagcattagtgatcaggagacagttttacagagagtccttctgacgtttggtcattctgtgtgaagctgactttgttatatttgctattttaagaaactattttaaaaattattcttctaaagtcatagctgtatgcattaaattttatttaacgtatttgattctcctctcagaacttataaaggcattacttctttatttttctaattatagtttttcattttcatacaaccattcaggatgctacagaaaaatataaccaacaagatgtgtagtcaaattatgtatgtatgtcatgtacatgtaaatagatatgcacatacatataatttgagatcacatgtatacactgaaatcatgtaggagtaatggttagtttttgatggggtagaccagcaagacagaggcctgctgaactttctgttttgaaatcaatgtctactggactttcttcttgctaagagaactcagtctttgttctcttgggcttcaaattgactggatacaggcagtcaacagtatatagagtgtggtctaatttactcaaagcctatcaatttaatactaattttatctaaaaaccatatgaacaaaagctaaagaacatccagaatagcatttggccaaaaccctcgcactgtgatttactcaaactaacccctgagatgaattgtcacagcccacagttcttacattgagtcatgggatttgaatgtccattgcacattctccttggtttatataaagtcacaatttcatttgtaaatgagaaaataggctacactagacaattctcaagtcacatgttcaaagtgtcaggggtgagttttgaacctgcctccagagcatcagttaaggctgggtggaagatagagaggtggggaggaggtaggagagagcttacaaaggctagcaccttagtctgaagtctggatgttttttaactaagggttcagctgcctgtcactcttccctgtgggtctgtcttacttgcttgtgttgaacttctgagccccgtggatcttatatgcaggagtgcattttgtggtgccattaggagctatggtgaagaccatagctgggtcaactatgcaactctccctctgtcctttcatagtccggcagaaatcacagctaccacgccattcctgccctgctgctgatgaactgacctcctgtgtctctccctatagttttcaaaaccaatggtgctatttttcgttatttaagttctgtttaaaaagcagggtgattgttaactgtgttcttttccaggttgtaccaacgcattggccccgaattccctgaattatttgtcagatgggacagcattttagagtgaaaatatcagttttcctaaattagagagttggtaggaaatggcagtccggcttcttgattttaaactaggttgagattgatatcctttggcaggaatctactgaggatcaaagtgaagcagattcttaggtgataagctctgagccaaagggccctaatgcttactattgaaggcctggtacctcagaggggcaagtctgtgcatctttgatattcctgggagccaaacgaacaccagctggcttgactgccttcagtaccccacaactttcttgttttccagcgattggactgtggccaatctgctgtccaaaccagggtgaaccttccaattctccttttcattaaataaggtgctctgagcctgttgttgctctccccggttagagtccagggatggagtcgcctgacagtggctgctgtgcttgtataaagtgctgtggcctttacaggcaggcagacttcacagcatcagtaatatccaccatcggatctgccttagcatattcctgccactgggaagcatttatttctttcattctttctttatttttttgcttgtagcatggaagaaagcatcttaaattctgtaggctacataattgtgcccacgagccttctcttgcaatgtgtcctgcccccataaccgtttttctctgtaagtgaagttaactatgcagaaagccaattaggagaattcgcttaggattctttccctaactgtctcttacagtgcatttggcattactgccagacaaagatgttcaaaatatagcaaaatggtctgtatcggcccttctactttctaccttcatgtgttagttgcaaataccagttttctatatgtaaagatggcaccagggatttgtttgatttgcctccttagcagtggtgggaaatatttgcacactttttataataattaatgattatccacagatatttgtttatttttggtaggtttgtataaacagtataacgtttactgaataattctgctgtctatggcatccaccattttcagtagagaacagccaataaatgaagcacaaagaaactaagtagctcactgatgtcacagagctgccttctgttgctcattccagatagacctcctcttcaccaggctggctttgttgttctcagatgatcataatcttagcggcagcttcctgagtgcctctctgtgccaagtgctctgctaagtgcctcaagtggaatgaaagtcatagccagcactttcttgccagtggatcaatcttatttacaaatgagtaagcacagggtcaaaaaattaagtaacttactcaaggttgggtaacagcatgagggttctgggaagtgtgacttttttttttccatatttcaaatctagtatctagttgaaaatgaaatcttgagaaattgtctggctgacagaggccatctttcagctaccagtgataggggaagattaactccatctccagcactgcagaccatgatggcttgcatcctgttggcagtgtctaatagacatccaagatcctagtgcaaagaaaatgtagctgttagattcccaatcctccatatatgatgggaaaatgtagctgttagagtccctgccctccaattcatgatggggcagaagctgacaggggaaacttcctgccaaccagtgattctcaaatggctggtaatcctgagagagaagctggcattttgaatgagacccttgtgaacctgaccgttgaatgttccgactgaggtgtgctgtgtgtgtgtggggggggggggaggcaggggatgaacagccatacagcttcctctcttgaaggattacttgttcatgaattctgggaagaagactgaaaatggagtgggtttttgcccccctggtgatgagctgtttctgctatggaatattgatgagaaattcatcaggcagacagatgcccagagagccatttccagatgtgttcctgtttatagtcactctgtggacatgcaatcatccaatgcctccctcatcaaggcgctatgtagtgagcacgggagcttttgcctttgtttctgtctctacaacaacctgtttgagttccttttaaaccatgacaactatttcctacgttctccgcagtgtcccacttgcatgctggactaggtggtcgttcttcacctttcctggtgaatcattcaatctgttcactgcctgcaggtaacaattctaacatgacaacatttgaatctattagaatcttcatgttttcttcctgttatcttttcaccttcaatggattagagcagccctccctcttaggagctctacactttttcttgtgaaggaatcagggtgtatgggtgacagatagaaatggagaactagccacttattcgcagaataggctggctagtgaagagttaccaccccacttgccattgtagtgtgccttttctgatcactcccctgctttcatggggatgcctgcttagaatatcacatggaattttctcccttaagtgctcgtgcctggagtttcctggaagattgattggaacgcaaggatttcagttcgtggcctcctgttaatcagcttagaattgttaaagtcattagtgctataaatttccttgtagtctcaatttctcttgctcagggttaattcagtttggtgtgggcagaatgccttccaccaagtaagtgtttttaatggagcttttcctggttaatgacaatggggacacccaaagggaactggcacttggttcagagctctgtgggagatgagtgtgctagagtgctctccctgggaatcagccagcagcgggaggccacatagaattcatttctcttccctggagtctcacgattggctcccccactacatctacctttctctctctctctctttttcccccttgtgttctaattctgtaaacagtcttagggatatttagaaaagttgggcaaaagttgcagttgtttgccttgcgttcatccctctgtgttgagactagaggaggttctttgtgtcctctgaagtcaccttctgtggaacagagcccataccacttccctgaatagaagcaagaccaggatgaagcctttccactagggcagggctgatgatgtccctctgggcagaggaggagctggctttcaagtgagagcttgtgttgtgagtcggtccacacatagtccctgagacctcacaggctatgcctctgtccacttctccaggcttctctgtctctaaaccttcctgctgcgttgttcaaggcttaaaccatgcagattcactctggattaaacacagagcagcctgccccattcctccactctctgactcagcacactgacactgcttatctctcggtcttttagtaagtgtcctctacctcatgcccctggtgtgcccctgttctgtgctcagcagctaggatggttctaatacttgaccaaaaaaccctctgcccatgcaagatccccgagtttgtgatgggttgattatccctcctcctttctccttcctcccgtctctcattttttnnnnnnnnnnnnnnnnnnnnnnnnnnnnnnnnnnnnnnnnnnnnnnnnnnnnnnnnnnnnnnnnnnnnnnnnnnnnnnnnnnnnnnnnnnnnnnnnnnnnnnnnnnnnnnnnnnnnnnnnnnnnnnnnnnnnnnnnnnnnnnnnnnnnnnnnnnnnnnnnnnnnnnnnnnnnnnnnnnnnnnnnnnnnnnnnnnnnnnnnnnnnnnnnnnnnnnnnnnnnnnnnnnnnnnnnnnnnnnnnnnnnnnnnnnnnnnnnnnnnnnnnnnnnnnnnnnnnnnnnnnnnnnnnnnnnnnnnnnnnnnnnnnnnnnnnnnnnnnnnnnnnnnnnnnnnnnnnnnnnnnnnnnnnnnnnnnnnnnnnnnnnnnnnnnnnnnnnnnnnnnnnnnnnnnnnnnnnnnnnnnnnnnnnnnnnnnnnnnnnnnnnnnnnnnnnnnnnnnnnnnnnnnnnnnnnnnnnnnnnnnnnnnnnnnnnnnnnnnnnnnnnnnnnnnnnnnnnnnnnnnnnnnnnnnnnnnnnnnnnnnnnnnnnnnnnnnnnnnnnnnnnnnnnnnnnnnnnnnnnnnnnnnnnnnnnnnnnnnnnnnnnnnnnnnnnnnnnnnnnnnnnnnnnnnnnnnnnnnnnnnnnnnnnnnnnnnnnnnnnnnnnnnnnnnnnnnnnnnnnnnnnnnnnnnnnnnnnnnnnnnnnnnnnnnnnnnnnnnnnnnnnnnnnnnnnnnnaggattgtaacactttttcaatggtgttttcaagagacaaacactgcccaacacaatgtagatgctccagaaatatttgtcaaacaaacaagtatgtcttacgattatatatatgtattccagtctgcattggtgtccacacatctccagtcatgttgcaaggagaatgatttattcttaatgaaaaatattaattttattgatccaaaggaggatgtaaaattgttttcctcttgcttgctatttccattttttccaatttgggctagccagccgtgccgcagctgaaccgatcccatggattttaataagggcgcatgcttccaagaaggataataagcaagtatggaggacagggtcacattcccagagcccttctgtcaggaggccaagattaaaatgcgtgaggcagcccagaaggccaggaggaggctgtaatttctcactgtggatttcctcagagtgccattagcttgccaaggggagcgtagggtagattgcattcacacaggggaagcaaggtagagccgggtaataccgaactcttggcatcatttcaattatgcattgcaagaatagaaccttgatcccagacatacttctctgaatcatacagacttgccagacaggtatttccattgctagcgaatgtcctctcatttttctctgtaacggaacctcagtcagcctagaagcctccaattctaaacagtatcttttgttataacccaggcacttgctgtgccatttggctctttgtcatcgatggaatctcagcacattgggaaacttataacgttcatcccctctggactttaaaatgcccccaaataatcattgagctattaagcccattgtgttggtaaggagaatgagtcattaaaaagtagttcaaaataaaaagaactaaggcccaaacatctcagctccctcccttggtaaatactggtatgaggcagtacacacacatatatgagaatggtttcatttatcaatagttattgatgagagcaatatgaagcaagggaaagcagccagaggactgactccaggaccacgcccccctgaggccgagaggccatccaacctccctctcctcccatgggactccacagctgccttcctccactgctctgtgggtgattgaagggagtgcccaggattccagcctacccagggctgccagagaacaggcaacagagactcacttctcatacatacagggacatctgctcatagctggagagctgacaggttcccttgcagagcccagcctagcttccagtcttcagactcagctacctggcttctgtatctctccttcattgttgcttaatccagggctaggcttcggccagctcaggagtgtagagcatcaccctgtcacttgtcactcacgcctgcctgcctggcactctagctgcccggtcagtagccagatgctggcctgggaagccctgggggactctagagtttgagatgctggtctggaaggaggtctttgtgaattgtcttaaggctaagagctaaaaagcaggctctcatgatttatgcccttgagctgtcatcacttggtattggttagaaattcgaacttctggtcctatctaattaaaatctgcattttaacaagaattcccgggaatgtgtgtgtttgagaaaccttggccaaccaatgttaacaagactggcagaatctcagaggcttgagagtcggtggggctttgacccttgtgtgactttgtgtacttgtatgtattaggttcctggggaggcaagagtgtgtggggtgcatgttgcaccatgtgttgcatacgtgtagaggccacagaaagacttgaggtctttttccaggcgctgtccaccatcttgatggctgagatggggtctctccttgccctggacctcacccagttgactggctggttttatgtgtcaacttgacacaagctagagccatcagaaggaaggagccccagctgaggaaatacttccatgagatcaagttttaaggtgttttctcagtgggggagggcccatcccattgtgggtgaaaccatgctggtggtcctgtctgcgttctataagaaagcatgttgagccagccccatgaagcaagccagtaggcaagagcaccccaccgtggcctctgtatcagctcatgcttccatgttcctgccctgtgtgagttcctatcctgcctgacttccttcagtaaggatatattggaatatagcaatatggttgaaggaacagcaatatggaagtaagaaaaaccaactaaaccccttcacttgctgtttggtcatggtgtttcattgcagcaatagaaaccctaagacaccaggtatctaggcggagtggcagtgagcaccagaggtcttcccgtctccgcttccctagcactggggttagacgtgtgcatctccatccctgacttgtttatctgggtgtttgggtcctcatgcttgcacggcaagcactttaccagctgtgttaccccctagttcccttttgtgcactttgcagcctgaggtatttataggctgtgtctttctttcttggcctggaggtagagtgactggcccctctgtcatttccacggggctgtgcaaggtggctcgtgtctggaccatcaaagcagcactgtcagcctttcttcaagtagtggccaagccacatggtcctcagtggaccagctactgacttcattgtgccttacagtcagcaaaaccagtaaccaccctgtgtggagcattaacacaggagtcacacgtgaagctgtggccattaacttgtttatggttggactgctatgcaaagccgagggaaagtatgactcttttaggattaatatattggacagaatgtctaccaggagaggaggcatttgctgataaatagaattctgctgttgatttatttagtaatggagacttgaaattagagaaatcagtgtgcgtgtgaaagccattgtcatctggttaattatgttttgccagcaagatggggaaacactttgtgctcagcgcagccaaatgcttccagccatagtcctgaattgtaaatgacaggcacctaagtggggataaagacaaggctcccggaatgccactttcctggaccgatgttgcctctgaggcttgacatctctgtccactgctgtaacagtgggctttttcggtggtgattttttgttcatgagacatcggtaactactgaaagaccgttgtcataatggtgagagatgaggaatagtaaggagggccaagtgtgatgtggtgactttgacaatgtaatgtcactgtgaagacacaccatgaccacagcaactcttataaagaaaatctttaattgggcctggagtacagttcagagatttagtccattatcctcgtggtgagaagcatggcggcgtgcaggcagacatggtgctggacaaggagctcagagttctatatcttcatccacaggcagcagagagagagagagagagagagagagagagagagagagagagagagagagcgccactgggcctgacttggcttttgaacccttaaagcccacatttcctccaacaagaccacacccactccagcaaggccacactctaccaactcaaatatatacgcttgtaggtgccgtgttcagaccaacacacgtggataccagtgacttctcttctgacaggcaccttcccttcttccagttctgatggaccatcaaggagtttcacagcataatctgtgatctgtctctccaatcacctctgcaggggagggattaagatggcagacagaatagtcctgttcagagactttccagcttgaatccctggaaccagtaaatatgttccctttcatgccaaatgggctatttcagggttggtgatactaagggcctggagaaagaaattttgttcccacttagccaatcatgtctgtgtaagttgaggttagagatgggagagtccaggaggccctgctgccagttttgaagatggacaaatgggtctttagccagtgaactgtggaagtttctagaatccagaaaaggcaagaaaccagatcattcccagccgtgtccagcaaggtacagttagcagatatgccttgaactgctttaagctgtcttgtttgccgcaaatgggaattatacatggaactaagcgtttctcctccttaggctgctcctgtaaagaaagacttgatccagtataaagtcagctcagttactcatcaacaaccatctacgataagcgagtgtctcctgcgtgtctatctgaggcacttggggtagggtgtgagcaacacgggacaggttcctcttctaatccagtgtcaggagattgataactcccagaagacagacactcgtgatccatagagatgcacatggaggctggagccactgcattcagagattctgcacttagggatgggaagggatggagaagccatgcagatagagtgttctcacaagacactgcaggatcacgtgatctcatcagggaggaagcacagggtcagagaacagccaggggtgcttatgttgatgggcaccttgcagtgaacttcaaagcatgacacaaatattagtcactgtggctgtgttccctctgtgcatctgtgagctatgagatcttacttttgtatatgctgaatggggagaaaacagctattgtccaaagattccaagatatgcaagcccaagttgagtattttcttagaatgtatgggtctgtgtgtcacagtgacgggacatcattgtctctgtggtctacgagggatctccacaatacgagtggggttgtgtggcctctttcgtagtaaagagaacattctggggtggtaaagtcaagggcattgagaaagggcacacagctgtgctaggggagaagtcaccaagtgattagacaaccttggcccctgctttgcaggtggaatgggtggggcgggcaggtgcattggttctgcagccttgtaaacaagtagttccctggtggagccaggctctgccagaggaagcagtgaggatatctggagtctaatctgggcgctgtctttctaaggcacaggaggaaacgggcagtttctaattaaggatgctgaagtgctgcccctggtaaggtcacaggtgaagtgtgtctcagctttctctatgctgaagagtctgtgtgcaagcaatacacatttttattcttactaattcaggctatccttttagattatacaccccaaatgagttcctccagattctctgtagttcctgtgataaatgacgcctcagaatgttgcaagcagagcagccttccctctcctgcctagtgacagaagcgaagtgggcatctccagccacgcgccttcctcacacctccctcatggctgctgcctctcagcatggagcatctataaagggaaagtgaagggttgctaagcaggatgggaaactcccaatgtagagatgtgggaaaaaaataaaaagggtcaaatcagtatgtgttatgagttgcacagaagcccgaatcctagaaagctccggaaagtagtccaagccagaaataaccaggcatgcagccaggatggagagcaggaggcagtctttcgatccctgctgtgtgtgccactgtcctgtcctcaaggtcagaaatctctgtcccatttccttccaatccagatctgtagcaaaagcctgtggagtacaaagaggagagacagtccatacgagtgatcctatctcccaagccctttgagagtttttgcattttatttgcttaaaatactgaaagtgtgccagtgccttgaaatagtatggttccctggcattctgccataaaggtgatcatgaaaagtggtttaaggcatctgtgagaattgactttatgaggtacactctctcattcatctaaccatctgtccatctatcatcctttcatctattcctacatccacccattcatccatgcacccacctatccaatccatccatccatccatccatccatccatccatccatccatccgaggtatggtagccactagatgccagacactgagctaggagccaagctaggggacaagacctgtattgagcctcctggaactcgttgatgtaatagaagccagtaaacatgtgagtgaatcacacacaagtggtgaagtgttgtagaggatgctgacatggtgttatggtagagaagcacatacaagttgcagaaaggtctggtttggaatcatgttgcttatggagaagccctccaccatcacgtttctgaatgtgcatttcctgtctcctcccctccctgcctgtatccacatcctttgtgcccgaatcattactctacgccctgagttgttgctgacacctgacacaggttttcatttacttggccatctgccttagtccatttgtgtctctatcatgagatatctgaggatgccagcaaaccgtgacgtttactctgctcaccattctgatggctgtggggtctgatcagcacaatgcagacacctagaatgacatgccagaggaggacaaaggatgtctgctgagggcagaatggccatgcttgtggaacatgtctgcttcacatgaccacaagccttgccccctctgcactccctcctctcttcctaacactctccctgccatggggtggctgtcattctagagcatcttctaacaagcctactgaaagatcacctgattgttagccaatgggatttcatctgccttactctttaccattggttccagtccagagcctgcgaagtttagatgctaccaacatgcagagaaccaagatgcaagtgactgtcgtccagccacaaggaaaggacttctaacaggcatggggttgcttactctagagcattatgctctctggatatgtagcttgaagatcatattcatccacccttcctgtctgtccatttatccatctgctcagctctggcagccttttccgttgtctattaaactaacttaattgtcctattgattcctcttaactgattctagtgtgtctttgacatatgcccctatgcatttgtttaagaataattttaagaatatagatgtgtgtatattttcctatgcccataagtatggagggggagggaggagagaagagagaagtaaaaaacagaacacatttggcttagacttctttaaatgagcttagaatacttaaagtcaccaactgttgtcaaaataatctaactgaaaaccttttttatgatatattattgactctctcatgtaatttatagagtattatgttaaaaagaaatgacaagggccagggagatggcttggtcaggtgcttgtctgtacaatcatgaagacctgcatgtctgtccccagcacctgctcagaaaaccctagaactgactagttcagagagggatagtgtcctggaatgagagagacagacagacagacacagagacagacagagagagacagagagacacaaaaagcacagcaccataaaggacaactcccaacctcgacctctggtctccttgcatacataacccaacacgcccacagtgcctaatggattataatgtgtgcttgagttttatttgagaagccccataatgagattgaaacttagagatctgtaaacattggatttgaatacacgctaccagttgtacaatgagaaaacccccttctcccattggtgctcaaaatctatgctctagaaactcagagagaacttgccatgaagagaattttattcttagagcatcctgccaattaaaatagcccatacagagtacgcttggaaagtggcctccgccatttattttctaagattccacattgacagggataacttattatttagccgtgactggtctggtctagttttattgcctcacgcacttgctgaccctattgatttaccctgaaagtctaatttagtccgggagaccacctgtgatttctgtacatttcacatgcggaagagcatcgttctcagcaacttgttctctctgatttccttcgcacatgagagttgatgtagaaaagacagctgagcagagcctggcagcctttcaaaagcacgcagccaagtctccatttactcactctaatttgaagctctgtatgccgggtgtagccacccctctcccaaaccacgtgagactgagatctcccgagacacagcgaggctgcagaaattgaaattaccttggcgtgatagatttttctaatcttctttctttcctgaaaaccaagaattttgaaactgctggtgccagttttatgcagcccaagcagatgaggatgatgcacatagatggagaggtggtttgagagtgagattgggctctgaggtctcgggagctttgtgtgcagaagtttctgtctagtcaggcttccgtggaatgtgtctgtgttgtgcttcgtgtactaacccatgcctcaaactaacaaagagccttcctctctgttacacaatacttgggtcttctgaaaaatacgctagaccatatggttgatgtgtccatcaaagtagctgctttaaaacagaaatgtcatagtcaaagccaaagatgttttgagcttctctttataaatttttacaaaagaaacaaatgtgcatgtggcagagcgtgcaagagtgaagagcaagtggaggagaagcgctctgttctctcccaataaaacctccagaccttgaatgtctttttaaagaagagaatccagtcttgggcagttacttagatttcattacataagtcagataccactggggggccttgcactggagactaacaagggatctaacctaaatgcgccttggggaagggtagaattcctgtaggatgctcagcaatgtatgtcagtatagtgtatgccagatccactgtgcaaagatggcgagtcagatgcctcagtgacctggggacaacccatttttaagattcctttaatggtgatgtgttttccctatcatgtccctttggcatgtcccacctcccccttgctttctccggggctgctttttgtgtttgagactcttgaagaagtgaaaccccacaggggcggagagtggcccgtcagggtaaagacaacatagaagaccttcagggagatacctgctaatctgggttagtgtctgcagataagggcacatgatgttccctcctgtgcatggagatatgtgcaaggtccacagctgagatctgcagttactgagacctgaagctgaagactttctgaacactgccgtgtgctatgggttttttttcctgcatgtcctgcatcattgctgcatagagcagaggtcctctgtccttccgtgcttggttcaccttgtctccgtagcatttctgctcttgaacattggcagttgtaccgatggaaacctgaagctgacgctataacttcttcagccgttcctgtgatagcatcttggcaatgttaagggagggaggatacattttggataatcatgtttggaagctacagtcagcatgatgcaggcatggtggtggtgaggacagctccagctgtgggggcaggaccgtgaggcagctggtcacatggcatccagagtcaggaagcagagagattaactggcttcctcttttccttttgatccaggctttgactcagcataaggaatgataccactcacatttagggcgagtcttccatgtcccaataggcctctctaaaagcaccctcaaagacagtctcagaggtgtgtctcctgggtgactgtaaatccagtcaaactgataatgaagattagccattatataccataataccttgacagttggcctgctgggtgactgacaagagggtagcaaatataacacagacagaaaaataactttatgactcagatccttggaggggccaggccagataaggtgagatttctctacattatgtagaactgtacaccatttaggaaaggagaactgtttatggtgctcacagtttaatgattttatacacatttggatggaggtaacagtgggtgccaaagggggactgtttctgtgttttcatgttctttggtttaattgattttcgatgttgttgatgcccctgtgtaaaaagaagaggcctgggctcataatctgacctttcttttccttctcaaaaccacatgattgcatcacagcttggacgtttctgcagttttgagttgtaggttttagtgataaacttagctgccagtctctggtccctcactctgagcagctcttctccatcctcagctcaggaccttccctttctgccctctcacctttgaggctgctaatgtcctaacctagaatcatacttaatgtttatatataagcgttatatagagcatgattacagaaactgaaaaatggcaaactggattgatgcagttttgatctggtaggatttgaatgtgaactaaatagtatacaggagtgtttaattttaaagattgtattttattttcattcatgtgtatacgttagtatgtgtacttgtgagagatggtgcccctagggttcagaagaaggcatcagacccctggggctggagttacaggtggttgtggatgctgggaactgaacttgtatcctctgtagaaagcacttctaactgttgagtgtcactctagctccatagaaatgttttattcttaaattttctgtttgtggtacatattatgaaagatcatgggttctgcaatgtattttgaaatactttaacacatacgcgtgtatagaattgctaagtgatagactatataaaaatgttaaatgttatattacactagtgagtgtagggatagggatacaatatatatcttcttatccatttcatctggtactggcttaaagtttttcaagataaaaactaacaataataaaaaggccatgcctgtgattccagcatgtgagaggtggaggcagagagattggaatttgaagatcatcctgggctttgtaatgagttccaaaccagcccggtttacaaagatcctacctcaaaatcaaagcagaaataaaaagtgaaacagaacaaaaacaaacaaaacaccgagggaaaaacccaactcacttcgaaagctacatttttaaaacaagattaaaatagtggctcatgcttatagctcccttgcaagatttattaagtactgggttcaaaagatatatttaagccttcattgttttaaagttacaactaaaactggataagatcgtgagtaaggacgttggaagtgctctctgagtgacgtgtctgaaagcagtcgctgacacagatgtcttcagctctagaagagtggcctatctaactagaatcatcaaaattggctatggcgccttggctatggcgccttgctcctgccaggaatctcaacacttggaggatgaggaagcaggaccaggagctgtaggatagactgggctacagagtgagatgccggcgcagaactgaattgtcaataagatggctaaatttgaattctgtcttagatttataacaaaataggcaagaaaaaaaatatgcttttgtttcttactacccattgattgatcaactatagacattacttatctgtacctctatattaaaatcaattataggcattgtttgttgatgcctctctattagaaggggatccagcccatcttttaaaaaaaacattgtattgattttttgagaatttcacatcatgcaccctagtccccctcctatctgccctgcacccttgcaacctctgctcccaaagaaaatacaaaacaaaaataaacaaaataaaaactttaaaaaaaaatctcatcatggaagcggtagtgtgttacagtgtgtcccatagtacacccatttgttcacacttctttacgtgtaaatgttcattgcagtgagtcattggtctggctcaaggcctctggcttctgctacaggacaatgactggattctcacaggacttttttcagacatcctgttgttgtcctgtgtcatggagatcctgcaacttaggactggctgcagcagttcatagatgggatagatgttggggtgggctaactcaaagccctggatctgggcctgggtgtagctgagttgatcaaccttctagctctctcctgtgcccataccaccagggccagttctactgtgctgtctgggcaaagtgtcgggtaccacccccccccccaagtcctgcagccagtgatgggcaagaccagctcttcctctctcacgacaccagggacagatctcctgcctgccatgggcgaccagcagcaaggtctggaggaagggtctctctccctcacccataccacctcacggcaggtgagtggtggggccaccagctcatctttttattattccaactctaatgtgggttaaacttatgaacatgtattaacatcattgttttgtcttatgtaaaacataaaatttagtgttttcacagtctaagtatgggtgaggctgacatgaagcaaatactcgcaagtgttatggggctaataactgaacttgctgttttcaacatcttgggttcccaacacatttgtcactttgataatgtggaggatttacagcactgtattctcctgtcactcgctcgaggctcagtgatgaaggacagtactaagccaggcaccaaagttgagcgtagcacatggagagacaggccatttctgtcccacatctcaggactcagcaggttccctgcagtcagtctcagggatgtgcacatctggattgctgtgtgagcgcggctatggtgctgtgcgtggaaggcttttcatgagcagcatcccgctttcgctagtctgatacacttggttgagcatcttccttttcttcgtcttgaaaaaaatgaatcgcgatgttgtatagctattagaatttttgttgtttgtttcctttggtttgtcttttcttttgatgatagacaatacctcttgaaggaaacatgttgatttgatttccttttagagatatttcattgatcccatttttagtttcttttgtggttttcatactactatggtttccaagcttaaaaatactcgggaagataatcttcgaatctagattgtcttcatatcaagtgtctcatgttctatatggcacatttaatcccactgtgcttaggtttttatatgtgtttctaactttgatttgctttgctttgttttactttctttgtcagatagacatctttccctgttcccagtttgacacgattttttgcaaatgcagtatcagatttatgtgtccaggagagtccggtgtggacaatcttatccttaacgtctttatttcttttcagagttcgggatgagtagaaaaaccatagatcccggtctgcctgggacctgctgttgtcttgctaaagaatacatcagctgaaaaataaattagatgaccactctaatgatgagcaagccatgtaattttatctaaatgcagcgacagcatacaattataatgcatgaattctcaaccgtgggaatgtcatatccagagggggagaaaatcgattttcaggaggctggaaatggggggaggcagaagatctttagtggtataattttcagtcatccaaaagcagtagtacataaacagaaattagccaactgtggtttgaacatgttaggaggaaaaaaatgaaagttgcatctgaccaatacagtctcacgatgtttgcttagaatttctatcaaaccgcgtattatagtgattatcgaaagcctgcagcagggtgcacataagttatacacaagggacttgagcatctagagcttttgacatccacaggacaccttgggtgccaagaatagttcgtctgtggcattagaatttcattggggtgaaagaatagccagggttcccgtcagtctaagctggctcagagagagggtcacaaatggaaggggaacgtggagaagcatggatctcacggtgaccaaatagtgccattgttgagttctttttttctcttgctttctttcttgttctcattagttaggtgttttcggagttttatatcatcaatggactcgtttcatgggaccaaggactgaatccatagcgtgtgcgtgtacaaatcatttgtcctaccagtgagcttccctcacagccccatgtcacccacttactgcagaagtgcccctattagtgtcatcagtgacgttgctgttgccgttgcctaggcaggtgtcccttcattgtcctgggatgacactgccgttcagcatgtgaccacatgggctgtccgatgctttcagagctgggtgccacttcctcacaggggacgatgaatgcaaaccatgagttgctgctcacatctctggttttctccctgcctaactggctttcccccgccgtttgccttgcttctttacctctgtccaggatctaattgctgaagtgctaaggagcttgagcccctttgatatttcattcctcggtgacctcatccaattcaacacctctagccaggatggaacccagggaaaacccaactaaacccgtcagacttaacctacttcacctgcgctctgcggcgggcgagctctctagaccctcttagcttcacctgctatgagctaatcttcaatctcctttccccacacttcagtccctgaatattctcaggctctgtgtttagtaggaagtcgggctcagacttgcccttccttcttcataggcttggctggtgcttacgtacatgcgtgcgtgcgtgcgtgcgtgcgtgcgtgcgtgcgtgagtgcgtgagtgcgtgagtgagtgcatgtgttggggcagagggattttgagagactcatctcaatagacagcatatcctagcgtggcagaacaggctgggcagcagagacctacctggagttctgatgtgagtctcccgttacctgctgaccttcctgtttggatgcactatagttcccttaattagttatgtgttcaaaatggtttcctctccacactttttctccagtcttcctttgcctgtaagtgcactgccacctcctgtctttcccaagccagagaactagcatgtatcctcattgcatctctgcaagccttcatctacatgtcctcaagcgtgccatccaatgtcccctctttacctgcccacctttctggagttaccttggcccccagtcattcctggcaccattggtttccacagagattgcagtctgttcttgtgctcacacttgtcttactatcccatcatgtcatcaagagatcttttaaaaatataaaccagaccactttattcctgccttaaagtttccctctagcttcgtctgcagtgagagccctggcgtcagtgtcttcacttctgtgtcactggcctgtagacccggaacgtgatgcccattcccgccatggtgtactgatgtttctcccacccaaacacttcagattcatcttcacgtggttggctgttcttgccttagaaacctcagctcattccctcagacaggttctccttagacataaataagggtgctgctcccctccagggaccacgttactctgttgggtccacttgtttgttttgaggcagattatggtagaagttcagccaattgtgagatctcggcttagtttgaggttggggcggggtaaggatgaggggtaactgggtgtggtcccagtgagacagcattgtgaggtgtgtgtctgtagaagacttacagaactgtacctttgaggacccttgagagccatcattcccccaaactgtaaacatcaaggacaacaaaattctgtctttctcaaaggcctaaggtggggtcagccacaagaagaggtctgccatcacttctggcaagtctcaaagacaaagatacccagacccctttgagctttagagccccagcctgtctccccagcctactgacaggtcttgagcatcaatggagaatgatgatctggggacactgttgcgttggctgctctgttgttttcaccttcttcccaggctccctttcagacagcatcatgccagggttgcgtttccctcaatgcttgagaataaagatcatggatgcagcggtgatatggagggacttggacatccaccttactccttcctcttctccctcttggatgcataggagatatggaggatcctggatgcccaccttattccttcctcttctccctcagtgtcctgctcccaccttagcctccagtgactcagtgagtgtggtcctatggagggaccaagccagtttcaaatcctggggtgtgagtccctccagcttcagtccctcatgtgttgtggacacccaccttgcctccttggctgggtcctgcttcctttctgaagtatctgttgggttgaggaagaggagaattgtccctcacagttggatgggtatgatgagaatagatctgagagaagttatagggatggatatgatcaaaatatgtggtatgaaattctcaaggaattaacagaagtattaatttaaaaacagggttaacacggtgccatatctggctgataatgattgcttggcctttagctgtttgcaaagaagccatactgacctccgctcccctcttacatttgaaattatttgggatgaaataaaaaatagccccatggatgattttctctcaatacaaatgatgtactgttaaattttcttaaatacaacccacaagctttggaccagtgagcattctttgaaagaaatgcttttatttttttttccagttggtgaataatatatatcaattgtggataaatcaagtggaaattgtgtgtattcatatgaaagataatttccatttaatgcctttcctttcggctatgcctgtactgtgcagtggctttctcttccactgtgagttttgccgtgtgatttttctgcgtgatggagagcctaaatctgctggctcagatctcttatagactatcaccttctctaccaaccaagaaacagtgtgtttgggattttgcttggtttgaaacaatttatactggaagaattataaaatgtagaatccatactatgaatttggctcactctgtatcagaaaagaagtacaactcatcacagccaaagaggaaacttcacacgtcagccatccagtcagtgcttctgatacatatttcatgatcatggctgagggctttccaaagtcagggctgtatcattcattcagtcttaaactataaggttattcttggctcttcttgttggctctcaggccttctcgctgctgatctgcatgaaccatttatcaagtcaggagtttaatctatcaaagtcagctttcctttgttctgcctcgctctgtcttgccttcccatatggcagtgcttcttgcgtgggcactgtcggcgttccagtggtgatttggaatgccgcggtctaccaagcttcttcactgttttacaaaataacacattatggagtgaagtcatatttcataggaaattataattataaagttgaccagtttctagacttccttgatgatattccaagcctgctggttgacagggtccctgggtgttactgcctacaagtcccgcctttccagatcactcatcctgaaaaccagactcagcttcacatctctggctttcttctatcctctcctggctatttattaactcgttaaatgctctggattctgtatcccggatagtccttggttctgcccactatcatttttatttcctggactcatacttctgtctttgtagaaggaaaattgatctagttaggtagcttttggtgggatccagatgtagaggccaaaactgattaagagattatgaacactgcctgccatgcgctggactatctgtacccaagctctggggacataacagtgagcaggagggaaaaggaaaaatctataaatgaacttacagcactcagggttggagaggggggaaaccaaacagactgctattggtaagtcaaatctgataatcaggcattgctgaatgcagaagagacgtcaagctgtgaaaggccatggggaagagggaggtgggtagcacagctgccgttctggagaatgtggtgtggaaaatggaagttaatggggcgccatgagcaaacgtacatcaaaagacaccccagctccaccacatgatttcctgaacatgcatctgtacccttgcagaaagcaataggatcccagatttctcatccactcccaacaggttttaatcatcctaagtcaaaatactgactacagtctccattcccagtctccattcccggtcttcattcccagcattgtctaggagaacattgaggagagccactgggttgcactggccttcatctcagccatctcctcctacttgccaccacattagatcatgagtgactccaaaacgcacaggcactgacacctggtgtctcgcatctgctgcactaggatgggtggcagaaccttggaaagtggggccttaggttactgtaggtatgggcactaaaggggatcctgagacaccagtccctttctgctcctttgctgtcgagccattccaccttcctgatcattgtccgtcaccattcaagtaaagacataatgcactatataaacaaactcaaagaaaaaaaaatcacatgatcatctccttagatgctgaaaaagcatttaacaaaatacaacactccttcatgttaaaagcactggagagatcaggaattcaaggcccatacctaaacataataaaagcaatttactggaaaccagtagccgatatcaaattaaatggagacatacttgaagcaatcccactgaaatcaggacaagacaaggatgcccacactccccatatccaatatagtacttgaagtgttagctagaacaataagacaacaaaaggagataaaggggatacaaattggtaaaggaaaaataaaggtatcactatgtgcagatggtgtgatagtatacataagcagccccaaaaattctaccagagaacttcttcaactgataaacaacttcagcaaagtggccggatataaaattagctcaaataaaccagtagccttcctttatacagagaataaacaggctgagaaagaaattaggaaaacaattcccttcacaatagccacaaataacataaaatatctcggggtaactctaaccaaacaagtgaaagatctgtatgacaataacttcaagtctctcaagaaagaaatcaaagaagatatcagaaaatggagagatctcctgagctcatggattggcagaattaacatagtaaaaatggccatcttaaccaaaggcaatctacagattcaatgcaatcccccatcaaaatccctacacacttcttcaaagacatggaaagaaaaattctcaaattcatctggaaaggcaaaaaacccagaatagtgaaaacaattcttaacaataaaagaacagctgggggaatcacaattcctaacctcaagctttactacagagcaatagtgataaaaaacaaaacaaaactgtatggtattggtacagagacagacctgttgatcaattgaatagaattgaagacccagaaataaaaccatacacttactgtcacttgttccttgtcagagatggcaaaaaatatacagtggaaaaaatgaagcatcttcaataaacggttctggtctagctggctgtctgtatgtagaagaatgaaaacagacccatatttgtcaccttgtacaaagctcaagtccaagtagatcaaggacctcaacataaaaccagatacactgaatctaatagaagagaaagtgggaaagagccttgagctcattggcccagggggaaatttcctaaacagacatgatgaatagcagtcaccaagtaaatgggaggcagagacgtactctctcgttctccccgaacgcacacacttacacacttaagggaggcagactttccgtctactgccaagaggttttagtcaaccagagggactccatattggtgacatcagggctccagtgatcaatgcttctacctctttggctcttgactgattgacagcttttaactatgtttccaccaggattctctaaaggcctactgatcttctgcactttatgataaactttattttgtttttccacttgtgtgtgtgtctatgtgtgtacatgtttgcatatgtgtgggctcatgtatatgtgggtgtatgggcacgtgggtgcatatgtatgtagaggcctgaagtggatgtcacaaatcatcccccatcactcctcaaccttattcagttgggcagggtgtcgcaatcaaacccaaagaccatcagtgcatgtaatcttgttagccagcttactttgtggatcccatgtccaccttgttcacaaggcatttctgaactcacatcctcacacctatgggaaagctctttaatcctgacacctcctcatacatggtgacattaacagtgcttgacacagcctgccacccaccagtcaagtgtgtatatcgtcacttcccaaaggctgtggtgttgaaaatgagcaagttcaggcctcaatttcaaatatcttccacttcagctatttcattcaataatgtagtcatatatatgccagcttccttgcttaataatgaaaatacaaagtgttgaaataacatatttctgctagctagtcaatattcagttatcaattatccatgtgagactacattatgcattaacttgatgggtgctctgcagtgtatggtttgtgtgttgcacggcgggcataattgcacacactcatgcatagtaagcagatgagggaatttgtctggtgtgtgtatgtgagttattaacagtgatcgccatgtgggtgcttcgggtttagaacctcattggccttctgggagttagcatctcagtttcaaagaaaatttaaaggcttcctctcccatactccagttcatttaatcctgtcaaaacagaagtttcacttctctggaaaaaagagccagaggctaatgagaggagggagggtggaggttccttggtgtggcgctctgacttcttgtcaaatgaatgacaaatgaagtgtaaatgaagaaacatgtcacacatctgtttataatggtggttttaaaagtgtaactgaatctgtcatactagccacattcagtgcacatctcagtaatgttgttgcatttgtttgttcacattgttactgtctgcagagctgtcctgtgcctttgttcactgtgttactgcctgcagagctgtcctgtgctgcactcacattggtttgttcacattgttaagtcttttagagctgccctgtgctgggcacctgttgcctttgttgttacttcctgcagagctgtcctgtgctctacactgcagcttagccctttaatagcacctctcctccacttcccacactgcagcaactaccattctgctctcccctccctcacatatgccagcagcctcacctccgtgggagcatcagtgtgtaaggtaggatgggtagattccattcgacatgaagtcctctcagttcacattgtctcatgggatagaattctttcttttcctgcttagcaacagttccttgtatcgtaaattatcattcacacacctgtggatacctgggtttttcatccctattggttgtcatggctttatttttatctaagtgcaatttgaaaatacagcatttaaatgagatctgttttcggttttctctctataaaaattaaggaagactatttgaattcacttgaaaactctggaaattcattatcatttgtcttagtttctattgctgaactaaaacatcacgcccaaagcaaagagaggtaagggggtggggcgggggagatggcttactttttactactctcaggctgtggaggagtgatgcctgctggcttgttcttcatggcttgttcattttgctttcttacagtccgagaccacctgcccaagggtggcagcgggctgagttctcacatacccatcattagtcaagaaaatgccctaacgcctgaccacaggtcagtttgatgaaggcattttctcagttgaggtttctcttcccagatgtccccagctgtatcaagttaacatcatttatagctccttatcctagattgttatttcctgaggaaactggtagcaaagattcctttaaacagataaaaaataattaaaaggtgttgaaaacaaccatttacagttctaacaacagatgctgagtgtgtttggcaaatgggttaaacaaaccacagaaaatggatggttagtgattactacagagttaaggagagctgggaacgacagcctgtccctttaagaactctgagattagattccttgctggacatgttgagggtaaagtgcacagttttgcttttacagtgccacaagtgttgcttcctgtgatggcttctgcttatatgagctaaatggcatggctcagaggtctacaccaaaaaaccaaacaaacaaaaaacaaaacaacaacaacaacaaaccatacctggtcatataagtgcgatcttttctaagaattgttgaaggctgtgaatgtggctgtataaatgagctctagagcttgtatagtaatgacagtcataatcctttcagttttctgcattctagaaattgacagagctatttattttgccttcagttctttgaagattaggttcattaatttaatttgtggttatagttcttgtgtcaactttgttgacatatgtgttgataactataatcgtctaattctctttttcattgtcctttagtccctccccatgatctctttcctgtcctcatccttggcagtgtgtctgtggtcatgggaatggtagcttccagcattagaaaacatcaataccttgctgcttcaaacccagtccttggcttctcttttgataccgcatgttttttaaattaaaaaaattaatttacggaattattctccatagagttcagttcaaagttacttaccccttatggcattataaactggttggtttgtgaaatactctgtttttaacatgcttagggatcagaggtcattctccactacagagaaaacttggggagcagcctgagaaacatcaaatgctggaaggagatgggagaagaacactattatgaaccagatgactccatcttaagtgaaataaacccaagcaacatcaaagactcacagtgtggtggtttgactatgcttggcacatagggaatggcattattaggaggggtgggctttgagactctccttctagcttcctggaagccagtctctcctggttgctgttggatcaagatgcaaaactctcagttccttctccagtaccatgtctgtctgcaggctgccatgcttcctgctatgatgataatggactaaacctctaagactctaagacagccccaggtaaaatgtttgccttgatcatagtgtctcttcagagcaatggaaccctagctaagacacatagcttattattcttgtcattgtgtctattgcctataaactgtatacagaattctgagcccagcatggatgcacatacctgtaatcccagcacttggacaggtaaggcagctggatgacagatgtgaggacagtttaggctacataataaatttgaggctgacaggagctacattgtaagcccccatttaaaagaacaacacaaaacaaaaacagtaaaaaagacacaccaacaaaataacaaaaaattgagagtccttcttggtagatttttcctttgatgagtatgaagtttccttctttatactttttgataacttttggttggaagttgattttattcaatattagaatggcttctacaacttgtttcttgccaccatttgcttggaaaattattttccagccctttactctgaggtagtgtctgtctttgacactgagttgtgtttcctgtatgcagcaaaattctgggtcctgtttatgtttccaatctgttagtctgtgtctttttattggggaagtgaatccattgatgttaaaatatattgaggaataatgactgttgcttccttttatatttgatgttatttttatgtttgtgtggctatcatcttttgggtttgttaaaggattactttcttgctttttctagggtgtagtttcctcctggtgttgctgttttccatctattatcctctgtagggctggatttgtggaaagatattgtgtaaatttgtttttgtcatggaatatcttggtttctacatctacagttattgagagttttgctgggtatagtagtctgggctggcatttgtgttctcttagggtctgtatgatatctgcccaggatcttctggcatagtctctggtgagaagtctggtgtaattctgataggtctgcctttatatgttatttgaccccttaaccttatgctgttaatattctttctttgttttgtgcatttgttgttttgactcttatgtgactggaggaatttattttctggtctaatctatttggaattctgtaggcttcttgtatgtttatgggcatctctttctttaggttagggaaattttcttctataattttgttgaagatatttactggccctttaagttgggaatcttgtctcttttctatatttattatccttaggtttggtctcctcactgtttcctggattcctgcttgtttggggttgggagctttttgcattttccattttctttgattgttgtgtcaatgctttctatggatcgtctgcacctgagtttctctcttctatctcttgtattctattggtgatgatgcttgaatctatgactccttatctctttcctaggttttctatatccagggttgtctcagtttgtgatttctttatcgtttctatttccatttttaggtcttggatcaattccctcacctgtttggttgcattttcctgtaattctttaagggatttttgtgtttcctcttgaagggcttctacctgtttacctgtgttctcctatatttcttaaagggagttatttatgtccgtcttaaagtcctctatcatcatcctgagatgtgactttaactcagaggcttgctttcctggtgtgttgtggtatccagggctcactgtggtgggagaactgggttctgatgatgccaagtagctttgttttctgttgcttatgttcttgcccttgcctcttgccatctggttacctctggtgttagctggtcttgctgtttctgactgtggcttgtctctcctgcaagcctgtgttttagtactcctggaagaccagttctctccaggaggaatttgggtatggagagctgtggcacagggtcagctctggggtgcagatgggacctgaaaggatccagtccctggctgttccttggttcctgtgtcctgatggttctggccaggtccctctttgacccggaaactgagcaaaagtggtggtcttacctgtgcttacaggtgtgttggcactcctaggagaccagctctcttccagtgctatttgcctatggaaccctgtggtacaggatcagttcctggagcagatggaaaccataaggatcctgtctgtgtcttcccatcttgtattggcttttaggtgctttttaaaaatgatgttttcttaagatgctttttgctgggtggttcagtttctgggagcctccaagggtccaggttactcgagtcttttggtctttttttgtggagtccttgttctctttaggtccttcagtcctgccaactctttcataagacttcctgagttcattctaatatttggctgtgaatttctgtatctgtttccactgggtccatgtactacattttaaatggggcaaaagttcagaaaggttttgctattatgaaccctctaagcatacttacacgttgcagagtactatcatgctttcagtcaagaatgaatgccatagccagatgaagcatgccttctattttgtcacttggccttaagggctgccgtgcagcttggcttgccatagagtgtgcttattctgcatgctgcaggagctgtaaagttgcggatgagaaccacaacccctggtctccacggcatgcaacttgagtgctcacaatattatggatacaaacatatcctagcagcaggcaccacaaagcatgatataaagatgagaaagtacatcttcctttcatggtgccacagggacagttgctgcaaatcggacttgcaaagtgctcagcacagtgaacccagctaggcattccattttgctttctgctactgtctgcctagcacccgagtgctgctgtaagaggcccgcagggaggacatttacattggcggttacactccacgctctagtgtaggcttggcatttctccccatagacggctaactagtaaatattttctgcatctgtcacaactgcacaactctgtcatgaggcctcacattcttttgctgtgatatagatggtatgcaaacacatgattgcagctgtgtctccacaaaattaaattggcagagtcatcccagtgtgccctacactgttccctgttcccagtagccttctgaggcactaaatttggatgctgacaggtgcagttttcctggcttggatgtttccctttcctttcatagttatgctaaccctacctgacaaaatcaactgagggagaggtcattttggctcaccatcgcaggttatactgtgtgtcatggcagaagcagtaggggctggaggtagccagagctggaggcagcagatcaagaagcagataatcagaaagaagagcttggcacatgcttgtgctcagctctctttttttgtttgaccatcaaggactcatgcctagggaatggtgctacccattatgggtgtgcctttctttcccagttaacctaatcaagataactgcatggccaggcccatctcccagatgattatggatctcatcaaattgacattgaggttgtctatcttactctattgccccatctcaaaatggtcagtctccagttcctggagctcatgtttttgaagaaagaagcttcagggatccccaaccagagtctggtggtattagttacccccactcccacacagcatgcctgggtctatgctggctgtagacctctctctctctctctctctctctctctctctctctctctctgtgtgtgtgtgtgtgtgtgtgtgtgtgtgtgtgtgtatgtgtgtgtgccttttggttctgcccctaccctggatcccagtcatctgccacagtacttggggcacaggaggcacatcacatacatttatctactgcttaaaggatgaaattatctatatctcattcatttaggggtctaggtctagcaggtgaagtttattccaagatttacaacatatgagtctttgttccaagattccaaagtggaacaatataaactctgccgctagtaacctcatagcactgaggaaaacaagcctctcagctccccttagttaagtgggggctatgactggggcaatctgtggtgacagtcactctgttctctcttcgccttgacagctgcctggtggaaggagttagccactctccgttcctgtcagtgtcttgtgctgtccttttgaaagagatttcttcttactattttaaaaatatgtgtgtgggtatgtgtctgtgtgtgggaatgtgcatgtgtgtgggtatgtgtctgtgtgtgggaatgtgcatgtgtgtgggaatgtgcacgtgtgtgggaatgtgcatgtgtgtgggtatgtgtctgtgtgtgggaatgtgcatgtgtgtgggtatgtgtctgtgtgtgggaatgtgcatgtgtgtgggtatgtgtctgtgtgtgggaatgtgcatgtgtgtgggaatgtgcatgtgtgtgggtatgtgtctgtgtgtgggaatgtgcatgtgagcacagctaccgaccagaggcatcagatccactggaagtttcccactgttgggacttactaaatgtgagtgctgggaactgagctcaggtcctattcaggagcagcaggcactcttaacccatgggccaccgctccagcccctctacaccctctgcctgacatcccagcacagggctatgctttgatggtttatagatattttggtgacttctctcgttcttttatgttagctactttctcattgctgtgagaaaatgcccaactaaagcaactgaaagaaaggaggaatggtttattttggtttgaagtttaagagggagcccagcccatcatggcagtaaggtgttcctctaggagtataggttgttggtctcagttaggaagcagaaaggatcaatgttgatcctcaagtggcttcctctatttctctgttttattcattctgggatcccagccatggcataatgccacctgtagcagtttccccccaattaatttaaatgttagtgcaacaaaaaggctgtgattggacagggaaaagggaggcagggctaggagtttcagtggagacaggtaggggaggaaggaagatgtaggaggaacaggacgatccagattccgtgtggctttaaatagccacaggtagttatgattatattataagggatggataattacaggacaatttgtcttatctaggtgggcaatttatatcattatcaattggctctgaaattattgtgtgggcatcttgtgaaatgagaatttattgatatataaatctgactgattaattataagcttcaagagttttgatttactgggttaaggggaactgtgaccgctgaccacagggggtggatggctgagaaggcacgggtggctctgaggccagcaaaccagagaaaggaagactgcctactggggttagccaaacagtggtgggacccctgggcagtgagtagctgggtataacacaggaatttggtgtctttttaaaatcatttattcattattatttcaaagacccacatgggtgggtctttgctattcatttaaacccctgtggaaaccttcaccacccgtcccagaatgtgtctcctaggtaattccaaatctagacagtttggcaatggacactgaccaccggcttgcttcactgtcctgcctttaactatagctcagtgactagtctggatcagagccaagggtaacagggtgatttcccttctcctggaacccactgctttgttgctggttcattgtaggttcctcatcccttgggaagactacaagatactttgaacatactttctccagttatcatcatgctgaaaggaataccactctaaatgctagcccgagcaaggcctgaccttggccattctctcttcttttctatctttcacttctaattagaacgaccaacaataaaaacacatgtatgtgccagctccttactaccaacgaggtgctcgtttgacgctcatggaaattctcttgaagtatctttatttctgccaagacaacaggcacagggacagaggtctgtcacagcctggattacagagcacgtagctgtggagctggggacagactgagctggcccaccatccttctctgttctcagtgtgattagtgacttctgctcaccatcgtctaacagcacaagcagcctcaggtctacacacatctctacaagtgtcagagaacacagatgaaggacaggcagtgggtagtgaccttcagaggctgagacttaagtggaaatgtcgagagagtatatctgatactaggcaaaggcgtctctaacagacagaccgttccagttctgggatattccagctttggaagtcccaagggagatgaggatggccttgtgcatccgtgctgctttctgtgtggagagcagaagctcggacagtcagagggtgcactcaaccacaaggtcttcttcagtgttggagacagaagtagatttttagctataaataaatttttttttcctaaaagtgaagttgattcatgaagtaatatggagaggataagacagcctcctctccctcataaactagccactcccctcatgcctggaatgtatacagtcataggaagtaactgtcactagaatgtgttgtagacaagatgttaggttagcacactgagttgcatcatggtggttgccgccgtgggtctgagacactcttccaaacctggctggaaggcgcagctcatccatgaagctgtctcctccttctctcttccctctgtgctttgccttctgatgtttccatcttcactggctgattctcagtctctctgaggatgtgttcccaaaatacagcatgcactgcccacccaaagatactctttcttcacagactcccacatactgatgtaaatgggaccaccaacaatgacttctttaatgacacctaaatcagtgtatagatgctttgttccttggttttctaagattggtaggagtgtggttatagtgtctgaatgaggaatgtcccccacaggcacgagtgtttggtgcttggtccttggttggtggcactgtttccgcagttatagaaccttcaggaggtgtagccttcatggagaaaatgagttcctgaactgtttttgagcgcttatagctatcccacttctagattgagctctgtgctttggaatgagtttgggatcccccagctcccagcttcctgctcttgccatctggtgtcatgcctcccccacccgacacccacccaccacacacaaggggaccatgagcaataagtaaagaatctcttccttaagttacactcagttgtgacattgtatcacatgaacagaagactaactagtgcaatgacttacatggagaacagaggatgcctttgaaagcctattttttttttttttttttactaatgaagccaaatttactagaatagatctttttgatcacatctggatatgtaacaaaattgtttgtgtttaagaaatgaagtagatttgtagatttgatgcctctctcatctcttttgtttttaagttttcttctttttcttcctcctcctcctcctcctcacctcccccctttttttaattatacaaggtctctatgtagttaaggctatcctgaagttcaccagtctgacctcgaaatcacagagatccaagtgcttggatagaaggcctacaccaccattcccagccttgatgcttctatttttattggaaagaaagagttcgctgaggaagttgcatgaggcagacattgactgggggaacaatacagactggggagaagtggtggagaggccggtctagaaaaaggaaagcttgtccacaggatttacagagcagatgtggaacatgcacgaccctaggaggccagaaagctgtgagttgagccctggagtctgggtttggtacaggtaaatctgcttggggagggtgtgctgctgagcccagggcttcttattctctggcacctgagctcctctttgtccctaagtgacatcttttgagtgacagtattttctgcttcctgttttggttttcaaagcagccacttgggcagcacagtgtgctagatcctgagaggaatcttgtctgaaatgcagatttgggttttgatctgcattttgtaggtcaatagtctcagttacttggcagtaattacagggctcacaaggctgttgctcctgaataatttatcctctgttagctacaaacaaactctcctaaggaacagctccctctctggctactgtttttccaggggagcgaggtggttcatcccttctagagttggtcttgagtacagactctccggtcacagagatgtgacctgaagcccacactgagtaccagacacgcttttctcttcctagcctcaggcacggatgaccccgtagatgtgttcttaacttggcatgtgaggcttcggagcatatccttgtctatttgtgggctttggcagcaggaagcagaggcgaaagcttttggtgatgcgcagagcaggctgatgaagcgccgtgcactgacaagtcctcttccatcatttccattcgggttttaaattccgtgtttatcccgttgtttgcttgtttgcttgtttgtttactggtttgtcctgagacacccttgttttaaagcccaggctgacatcagactgggatccctctgcctgtgctaaaacagtaagcatagcgcaatctttcttttgtaagaccatgggttctagatactaaatccatgtccacatgtttgcactttatggaccgtgtcatctccttagccactaaacttttaaattttaattgtcaagaaatagttgcttgcatgttgccctggggaacagcatgattggttgactgactgattgattgattgattgattgattgatttgtatgcattttgctacagcatcactcacatggccaagatagtttgcacagaactgcagtgggaggcatgggagggatgtgtcactgtggcttctattgctgttacagagtctctgccaaaagcaacttttcagggaaaatgatttattctggtctacagttcaagggtcacagttcaagggtgcagtctcccatgacgggaagtcaagcggcatctggccacgtcctattcatgatcaggtgtcaaagagtagtgagtgtgcatagctgtttcttcctccccttctctgtgttctgcttctcaaacccagcctagggattggcgccacccacaaggatttcttcaggataatgagatgctcacagacatctcagaggctcatcttccctggaggaaggggtcatcatgcccccagggcagaggctgcaggctgtttatcttaaagagtgggttttgttaagtatggatgagtgtgtgtattagttacctttccgttgctgtgataaaatgccatggcctaaaacagcttacagatggtagaaattattcctgctcctggttccagagagggaaatgcataataagtgtgtgggttggtgagggttgcctagcagcaggaagccaaagcaggaacccaagagatccaatctttagcacaggaaactgagaaagcaagctgcaggtgggtgtggctatgaatactcacagccagatctcagccatggccttcttccagcaagcctgcacttcctcataacctcccggaacagcactaccaaggaaggactgaatactgaatactcatattcctgaccccatggggaacatgtccagacccccacaatggtgaccactggcctgcaggctcttgcttagtgtttgtctccatttgtggaagttttctcttccagtcttttctcttggaaatacagaagggaaacagacacctgcctggtaagtttgacttagatgcatcatttttcatatcgaagccatggtcatctgtatccaaggacatcgtttgtgatccctaaatacctgcattgttctcctgactccgccttaagaaacaaacacagctttgacattcagaaagtccttgcagggaagcaagtgttttccttcccaggacagcatcttagagcccgagactgtgctttccgactgccccccaacctggcacccttttcctttgggcagataatgattatatctgggctggaaggaacacccaggatgcccagttacctggttcaggggccagaactgaatcccccagttctttctctgtgatttatgcagcctgtcctctgattattgctagttagagagaaatcaggctcatacatttctgggggagccaaggtaaaaagacagagagagggggggagggagagggagagggagagggagagggagagggnnnnnnnnnnnnnnnnnnnnnnnnnnnnnnnnnnnnnnnnnnnnnnnnnnnnnnnnnnnnnnnnnnnnnnnnnnnnnnnnnnnnnnnnnnnnngggagagggagagagagagagagagagagagagagagagagagagagagagctcttttgtcagagtaataataacacttagagcttctattgggctttttatcttcagagggcttgccgagcattagctaattaagaagtctgcacaatatgcagcagctgttggaaaaataaatgtgatgcttgggtgtgttaaagaatgcgtgcagaaacacgagggcatcctccaccaagcacttgtggggctcacactgatgggtttgcttcacctggtgggaccgagcagacattccagttagtcctgtctgcagagtaagggtggctggggatagacagaggcggcatgtaatggagactgcaaagactgtataacacacacacacacacacacacacacacacacacacacacacacacaaagactgtataacacgatgcacagaaggaaagccaaagagaagccccagagcctaatttctgctcacgttctacagtcctaataaaacaggcttctagcacgtcaatactgacaccctttccaagaagaagcattgttcctgattcacgcagttcactacacgcattgcacagaacacccgctagatacttgagaaagatgcttagaagttatctgcgtgagggctggagaggtggctcagtaggtaagagcatggctcctctgctccaggacccgggttggattcccagcacccacgtggccactcacatccatgtgcgactccagttacggggatcagatgctttctgctggcttctgggggcatgaggtgcacgcatgtgcttagacatacatgtaggcaaaacagccgtacacagaggacacatttctaaaagcttatgtgaagaggagatgagtcagttggtgatgctggccccacaagcaggaggatgtgaaatctgctcaccagaaccacactaagaagatgggtcatcgtgcttgtcatcttggacctgggaagatgggtttttgtgtggtgtcgaggtatggtgacctttctttattagtgcttttatagatataagccaagggatcagtgtaacagctgagttggagcttagataatggaaacaaaatgagccatctgaaactcttctgttgttgctcggttttcgtctttgcattggaaggtgggcagcttttgttttctcccctcttcctcgcttttcatagcgctctccattgattgcaggctgatattctctttaaactgtaaattctacagggttgaccagaggtcatccatgaagagagaggagaattagtggatgtctgtgtactgttaggtgcccctgtcacctgtgggctcaagcttacacacctgcaggacagattagatgcctgccctccactggctaaagaagaatcagagttctgactgaattgtctgtcaaattggggttatgaaaaaacaacttcctccttctgagaggacaagtcacgaaggagacaagagagaggtggcttgagaacagggggtattcaagaaattgacagagaatgcagaggcactgtgtctctagactggaaagaaactttctgaaggaaattatagataagctcactttgctaaggaaaattgcaggcctaaaactggaagaaagtaagaatgacaagccaggtgacgttacatccccagtccagagtcatgcaaacaaatgggcatccactcggcatatccggcagaatggcacagcacacggtgatgtctgcagcatccaaggctggctcacgagagcccagtgccgggaccctgaggcatctctctgcagacttggatggggtgtgctgggcctgtcatggttagaaagaaaaagggatctggtgttcactggctcctctggagcatcggttaatgttgaaaataatcgagagcaaacacaacgtctgatttttgttccggccatgttttctggtagaggaaggattgattttaagtaaaacaagacctgaccgtataacggaatatcatgcagctatttgaaacaaaagcctttctttatcaccacatgctgcgaatgggtaaagcacaggaagataaatgtttggagggctgcaatatgtgtaagcgatgagcgtatgtatttactggcctttacctgtgaagacatggctgactttctctggaaggataaagtcctttaggaatcacaggagacacctcttccccacgttgcctccctttccattctccatcttctaaaagctcccttttagttttaggtagctataggctcatgtgtggtagaaagagctgggagtgtagctcagtaaacaacatacatagcatagataaagtctagtgtccagtctccaggatgggaccaggggagagggaggaaggagagaaaacgaacataaagagatcccttcttcctttcatcccctttccatcagagctaacactttgcatcaatatatggcttaacaccaggatgacaaagttgacagtgaccacatttcagtttgccagtgttatgtgcaatgcaaaaacatatgtgtgttatgtaccatacatctttgtcacatgtgtacctgtcttaattagggtttccattgctgtgaagagacaccatgaccaaggcaactcttataaggacagttaattggggctggcttacaggttcagaggttcagtccattgtcatcaaagggagaagcttggtagtatccaggcagtcatggtgcagaaggagctgagagttctatatcatgttcataagggaatcaaaagtctagcatcctcaggcagctaaaacgaagctctctcaaagcccgcccctgctgcatgtagttttaatgcctttgctccgggactggccatgctaccagcccccacgcggcatcccttttgttctacccacctttagctctgggaggtgactgcactacccccagctcttatagcttcccttgaatcctcagatctctctctctctctctctctctctctctctctctcacacacacacacacacacagagtttgttccctttacaacttgttttcttggcacaattgctgggcattgctatctcccgcctagaaaagcgtgcccttaccaatttatcacctctgtctctttacctgccctgaacttgaatggctagtcccacctggcccatgccagacatccttggccacccacctgtagtggtggccacagtcccagctcaccccaccccccaccccccacccccaagacctcacatggttgctgtgtccttctccctccacatcatggcagaaaaacctctctcctcccttgcctctcccttttcctcctggcaccaggaagtcccacccataccttctgcccagctattggccccaggctttctttactgacagatcaagaaccaattggggaaggagaccttagcatcagaactgtccccttcatacctcaacagtgacacactgataggttctctgctgccaaaatgaccaagttcaagtcagattagattatattaaagatggctttattgggaaggtatactccttggtttagtggccccaaggaccaaggacagggaagtcaccatatggaaagggggaggataggggtggggcacacatgcaaatgtaagacccaaagatccttaagtccaggatgtcccactcacagaaacacagagactgagaccttttcattcccccctttagaaagggtaattagcctctcccttcctgagaggccagtgtttcatgactgcccctaagcagcattgatggccctgggtaaggtgaggtcttagtcagtagaagagggaactgaaacatttttggttgttatctgtacctgccttgcagttggggctttcttgtaaagcttgttttgctgggtcattccaggaagggactgttcctcacaaccttctagcgggagatccccagcatgctattctagcaaggtctttcagcggtcatcttatgttctctaaggtcacacattcccacacagagagagaagaggaggagaagaaatgagagagagacagagacagagacggaaaatgacagaggagcctctgggggaagggcagcccagctactgggctgggaagctcaggattgatggcagagtatgccaggtagagactgaggaattctgggagaaccaggaggccaagtctgctctgatatgtaaaatatgcacttcagtcccttgtcctggggtccaaaaccaaagcacacttccttcaacaaggccacacctactccaacaaggccacacctcctaacagtgccacccctggaccatgcatattgaaactaccacagtaatgctgtgtaaccaacagtacagtgaagacacagcacttggaccccgagttaacctcatcttccaattcccagacaactcccttctccccaaccttatctgtgacaaatgcaaatctattcttcttggtcataactttgtcatttcaggattgccatgtaagtggaattatatagtattgtgacttttggaaattggctttttaactctgttatttctttgtgactcatctatgttattgtgtatgtcagttcaccaagacaaactatttgggattgtttttatcctttctgcaaatacggcttctaactaaaggacaggctgtcttccctcgtgctgatgtgttagggtatctcaatcacttcattatttatcttccattccctctcccgtgtgtaacagtttcctccaagattgaaacattccgtcctgcagggccgctccttaaaacaaaaaagcttcaggaagtttctggatctgaccaggaacgtttgtcccacagctccttcaccactcgtcattcattttcctgacggagacttgagcatctcttagaattccttgtctgcttgtttatctttgagttccaagtggcttctctgtttatatgattgcgattgtatatgtaaatcaataaggtttattggtagtctattcctttcttgccttttgagttacttttcaaaaaagacctataaattaatttttaaaaaaacatactaaatgagtttgggttcattcaggatacattcctgtgctcaagcaggtagccctgtaccacagacacacacatggctttgtgtacattccatgggttaagacgaattaataggactcagagagtcctgggggaacagtaatggggcagatggcagaaggattagatagggttagagttgatcaaaagcacctcattgggcaggcatgtgtaaaattctcaacaacagtaacaagctacaacactcccaaatcttgctctctcaatacaaatgcaagaaataacgtctctgccctgtgcccagtcctgctgtaggcgggaagagaagtaaaggtgaaagtcagaaagacgagctcgaagtgatccggaccgagttttcctcttagaaccgctgtcattgtgtcccatagcttcgggtatgctgtggtttcattttaaagaagtgtgtctgctgttttctaggtggtatataaaatttccattatgatttgttgaacatttattattaatttttaactgacagatattcattgcacctagttcctggtattaggcaagaaatccttttggtttatcatatgctttggtatcttcaatgtctcctctgtccttattgttccctcgtcttccctgctaatgcaattttttttctctataaaatctagggtctactatgagaagaaatcaggcatcttctgtccttttgagtatggagtttctcaaaaaatgcacccattgtcaagtaaaatgacgcatttcattttactttatgtctaaataaaatatcatcatagatgcatatcacattttcatcatccaattatttgttgatgaatactcagacttattccataactacattaatgttgataccaaatatttctttgatacattgacttagattattttatttatatactcgtaagtgatatagttggaccacattatagatcttcttttgaaatcccaccacctttcatggtattcatattttcgttatcagtgtatacagtttctgtttacttatatcctcagtattatttgtggtcattttttgttgttgttgatagcctttctaactagatggagagggaattgcaaagcatttttaatttgcattttcctggtcctttaagatacctgaaactgctttcaaatccttattcaataaatattcaatacttagctcattagcccatttattgaatggatggcttgtggttttgttatctatttctgcaactttatatatgctagatgtagatctgtataatctataatccacattgcccccattctttttttttttcccccccgagacagggtttctctctgcagccctggctgtcctggaactcactctgtagaccaggctggcctcgaactcagaaaaccacctgcctttgcctcccgagtgctgggattaaaggtgtgcatcaccatgcctgcctcatttcctgcattctttagattgtatctttattccagtgattgtttcatataaaaaacatttcagttccattaaagaagaagaatgaggaggaggaggaggaggaagaggaggaggaggaagagaaggagagaaatctagagagaaagcattcctgtggaagtttccccagcaagcctcagaagctgaaatgcaagggctgcccagggcctcttaagcacagagcagataaagctgtattgcccaggccttggggttttaggatccaccacttgtcagttatggaagaaagcagggagccccaatccatttctaatgttcttgaaattattattatgagagaagtgtggaaatataggcaaggttctcgtatcaggtctaagtcacagaaaaccccacacagactgtggctgttacataatggaactgtcccttggaactgggaccaggtccagatggacactatggcctggtcattccagtgtgaaaagacagtgtcacagacatgcacgcagactcttcagacaaggcctcccgctcctgctgtgtagacagtaccctggcttcaggtctccccaccatagctggatgcttcattaccatgcttactgccaaagggctcacttgctgctccttggcgcatgtccctacactgagacggacctgatggccttgcttgttacatgacatcgctgtctgaatgtaagaagagaaagaatgaaaggtcagtgctgagaattcctaaggcctttctttggcagggtgtgtggaagttgtcagatctgaaaactttgtttttagcgaattgaaatctggtcaatcttattcatccttttgtatgtccttgatgatagatgtttctttaaaacgactttcagggaatgtatcatgtgcatattttattctgaacctgggatatgtgccaatgacccctggaagaacatttcatgtctctttttgttgtatgaaagactgtctaggtcattgtaaccacagagcaagtcgattcttggaggagtcttcctgggacccttgcttgccgtgtaacttttatggtgtgaagctctgactctgtttcagatcagcagaaagccaatcatcaccatcatcaccatcatcaccatcatcatcatcactttccccgtgtagggccttactgtgggttaggaaagtttgagtgcgccttgactatgtgaatgtttctgtgtgcacacgtgagcttgccttgactgtgtgcatggttcctttctaggcttttgctttttcttgcctgccactggaccctgctaaatctccacctgtgaattttattcccaggttgagtttggccttagcttcccttctattgatcatactacaaaagattaatattaagggcagtttagagtcaacaagaacttgcagctggtggtgccatctgtgcctgtcaaactgtagccaagtagctttccataatggaataaaaccagaatctgatcatggcttctgctgctgtgggtgacagagaaatgagcctgaggaaaaggaggaggaggaggaggaggaggaggaggaggnnnnnnnnnnnnnnnnnnnnctctagagactccacaggtgccaattcttgtgcacacagccctacttctcctgagtccaaggggaggttggtaaccccaggagagatgggaacagaaagggagtcaagtggggctggtgaagaagaggttaatacagaggtttgagcttgtaagggggtacaagtgggtagaggggtacaggcagaaggcggggtagaagcaggagacgaactaggaggaagctgaagcagaggtggagtaggcaagatatggacaggaagaatggttactggatttggggctgaaatgggtattggagctgtggctagggcagaagttatagcagaagcaacagaagcagcaggagggagaggagcaggagaaggagaagcagcaggaggagaagcaggaggagcaggaggagcaggagaagcaggagcaggcggaggaggaggagcaggagaaggagaagcaggaggagcaggaggaggaggaggagcaggaggaggaggaggaggaggaatagcagcagccgccgctgtcatggctcaataatgggaaaaaattctagaaattggtcaactttgacatcttggatctgtgtggccgttatgtgtgttgtgtgtgtgtgtgtgtgtgtgtgtgtgtgtgtgtgtgtctgtctgtctgtctgtctttcatcttcgatcttttctagtgtctaactgggtacaggagaaaagtagagtgataaaagtgagaacagggaatgtccagggaaggtgcagggctttcctggctcggcacaggaggatggcagagatcacagtgagggacatgggggtacctgcttggtatgtggttcctaagctctgttttttgtgaggaacccgagggttgggagaagcaaagacatgaagagaaaggtgttgccactgtataacgtgtctacagtaagaagaatggtaagcggtaaggagagggtcctgcacgaacaggagaaaagccacagagagcatgaaactcttcttagaaggagaagcaaatggacaacaaataaccaaggaggtattcagcctcgtaactcagaaaggaagtgtaacttaaaactacagtagctatggacactaaagaacacacctgctaagcaagcaaacaaacaaacaaacaaacaaacaaacaaaaagattgccagacacaaatactggtgtggatacataacaggcaggagtctttcacacgctggtatgagactaatcagcacaaaggctatgtaaagtttttattaccacctattaagattgattgtatgcattccctgccttcttagcaatactgctcctagtcacatgtgcaaacttagcgccacgcatgcatgcatggtattgaagctttatttgcagtggccatatttcagaaatgtccatcgaaaggaatgactattgtatcctagagaattatgtaaaatcatgaaatgcggacccttctcacatgggcgcgaatagaaaaaaagttcagatgtcgacatgtacattctgcatgatttcctttatgcagaattctgtcctatgttacagtgtttgattatggtttcatatgcattggctgaactgaagtgctccgtctctgtgatttctaccctttctgtgaattgtatactggcatattattatgtgttctctagggagatgcaaacaaatccccagatagggatctgacagcagaccaaaggccagcggggaacagatggacttactggggttgcttacaagaccatggttgaggggtttcttgctggagcagaaatgacttcaaggcagctgtggccccagccgctgtcaccaccctgaaggtttactcctggtagcatcccctctttccagtagaccttaggtgcatgccaccctcccaagttgcctgtaaaagggtagagtgtgatactgtagcaacagtctcacacgggatctagtcttctaactacccatccccctccgcatccttcctgtgtggtgtggtcacagcaaagactcaggttgtcatccagagccagagctgtctctgactgtatgcgttgaccaagctgcttcatctggtgtgcacgtccattcagttgcaggcttagtgttgggaaagcctgggcatcctccacactgtagaagaagtgtggtgactacagaggttatggtgggccttagaggtatgcagggtgtgcgttaagccacgccagccctttctacattgagacctcaatgggcgaaaacactggtcagtgttgagtggaagacactcttccaatgatccgcaaaagaaccacacatgtctgagtaggattagcttggatagcatgacggctttagtggacacagcaggcaaaaatctgcacattataagggagcagaataaagtcaaaagaatcccggatctgagccggcattctgtacatggaagccatcctgtgttaggaaatatcgtgcggtaggggagggggagtggggaggtgtacctgcaggcccatgccaaggtgccccctgagaaatcacaccatgcaacagatctgatataaaaggggggttacttgtgggaaaggaggggagtgagggcgtagaaaggggatagaagcagacagatgagagtagatcgaggagggcagagaaagggggaggaactggatggaaacatattggaacagcgagagggggggaagggaggaaaagagagtgcaccaaccagccaactgggggtggtgagcatttcttttatacacgcccacacctggaagcaggtaatgacagatgatgacagaagccattgctaggtccctgagaggagcctagtggaattgcctataagccaacacccaggaccttgtggtcttctacactgtccataagccaagggcgacacaaaggcaccaagaagcacgtgggagtgagtactcctggagtctaggtatggtttgcacaactacaaaagcagaagagactggaaaagcgtcccagaacagcgggactagcaatgaccactgagaccctaagaagcccaggtttgctagcaaggccatcctggacgtgggcatcctcttgtgggtcaagacaagctggtcattcccagtccgaccagaactgaatgtctgacttacagagtatgataactaatagaaaaatcacaaggcacgttagaaaatatgatcaaataactgaatttctaagaataagggaaatgaacctggcatctttgatcttgtaagctcatcagccagagtttaaaataattaagactaatttgtttgagaaaacaaatgtaaacgttgcttgtttcacaactggaatcaattcatatatgtaaggatgaaaggggaaatcatagaagtgagagattaaactagaacacacaggagatgagtctcctagcaggtcacatacacatacatagtaggagacacaaatggccaagctggaggcattgattaaaactgtgaattgaggaggtgtgagcaggagagtggcaggccgagagaacagcttctgtatgaggcttggcacaacctagagtgtccctagtgaacaaggggaaggcagatgaattgataaatacttatagagcagtggactttgcctccacggtcttaacacacttgacgtgaactagtctgcaaggaaaataatctaccacaaatattttgagcaacattggcttgtcacaaacttgcctggtttacctggaatcagataaagaaagaaggtggatgtagtgtttgggacaatggtggctgaggggtcttcaaaatggagaagcacttggaggcccaacttcaaattggtccatgatcgcaggcagcctaagacatcgtgagccccatgggaatgattctgccagaggagaacccaacaggtgattccgctacaggtaccaggagaatgaacaacaatgagaccagaattgcattttcaaggggcatgatggcatcccaaagccaaacaatggcatcttcacctgttcacgggaaacacctgccagcctggagctgtctctggagaaactgtccctctgtatgcacacagcacaggagctgactcgggggttggaaggagccacttaggcaagaggagtgattccagatagacggacagagtgacaggagactgggcgagcagatgagaagggaaatggacttgccgttgtgtcagacaaaaccaggatgcctggtgaaattgaagtacagggcatggtagcccgagcacaggagaagatgaagtcgaaagcaaacgcagggagctgggaaaggtcaaggctgagtaatgaaatggctacggttgtcactaaaatggcttttaaaaagaatgtagaagtgacagactgttaggaaaagggggtaaatttcattttaaaataattcaactttttttaaaaaaagaaataggtgagaaaaacaaagaaatataaaacaatttagaatatgttagatttcattttggatataaccatgtttttccattatatataaacactctaagatttctcctgctcctacagagacacattctaacatatcaaaacccagaagggaaaggagatggtgtgaaaactctcatccagaggccgtcagtccatggacttgctggcattggatactgtgggctgtaagacaggaggctaccttaatgacaggtggtactgagaagctaacatcctcacagcagaacccaacaaaatcaggaacatgagattctgtcttgagtgggtgttttagtgaactcttcctccttgaacttggagtttgagctgacagactatgaatggggatctggggttgaatgtgaagtgaccccctataggatcataggtttaaatggttagtacccaattgtagtccagttttgggaggagagggagtctcaacggagcagatgggagtgggccttcaggttttatagtctggcctcatctcccgtctgtgtctggtggtatgagcagtgtgaatgagcagtgtgaatgagtgtcagccttctgttcctgctaacagccctttatcccttgatagactgtatcccttccaactttgagccaaataaatgctcccttgatttgtttcttatcaggcactggtcacagcaacagtacaaatatccagtacaaatgatattgttggtttagggtctggtggtgtctctgtggatgatagtgtgtactgcacaaacagagggatctgtgttcaaatcctcagcacacagagaaaatgcagggtatgcatgtgatatcccaagcactggattgggtacagaaatgaggatcattggggcttgctggccagtagcctttttctggcaagaccctatctcaaggaaatactgtgtgtgtgtgtgtgtgtgtgtgtgtgtgtgtgtgtgtgtgtgtgtatagagagggggaaggagagagagagagcgcgcacaagttagctgtgggtttagcctaatgttgcttgtattctaatgttaatttggatcccaaaattgtttgcatgagagagtccacaagtccacatgaagaaccaggagagaccctgcccccagttggttctgattggtaaataaagatgttggcagcccatggctgggcagggcagacagaggcaagatttaggattcctggacttggaactgggagaaggaggagatctgccatgcatctgagtgtagatgggagagtggagaggagaggagaggagagacacccagaccccatgcttgaaaatagtgcaggacagagaggcatggctaccatgtgaaggagccaggagagcatggtccagagcacaacccagttggcagccctctgggtgcagagcagcctagatagaatatggagtttaggaataactcgggattattggtgggaggtggattaaccacatggaggttaggaggtggcccagctattgagctgattaaggcatatcaaaatataaaggctgtgtgtgttttttgtttggaatgtaaactactggggcgggtagcataaaccaggcaatcaagatgtattattatgtaattcaccagagggcaggatactctatgccatgcatattcacatggacatgtgcaccgaaacacacacatacatcatacctgcacacacacagtaagcaaacaaacaaacaaacaaacaaacaaataaaggcattggtttgagggatatggttaaccagccagatctaaatgacatatcaacgccatatacagcaggctatacatccttttcaaggaaacacagtagttaccagaattgatgagtacagttcagtaatgtaaggctttcgaaaaagtcagtgatcgaaatcacacagaagatttcttctgaacacaataaattaagctataaatcagaaacagaaaagacaacaagagcatacccatatcctatatccctaactcacgtaggtgcatttgacgtgagaggaaatgcccagtcacgttccataaaagctggaaatagcactgggctcgccatcagaacaaggaaaataaatgctatatccacatagtctggtaatcaatgaagaagctgccacgcagcctccctcctttgtgagcctgagagatgccatgatgagccaagcccggtgcagagagccgcctgtgagattccactggaagattctaaagcaggcagtgctgggctgggaggatgcagctcacagtagcagtttatattttatccacatctttaaaatatatatgtggaagcacacactcacacacacaccctgtagtaaatgcctcaagattgaaagcggcggaagttttttgaaagagcagaaagatggtcaccgttacagggcggacacttttgcattctcccttcaggatcctctgtccctcaggtgcctactttgtgctccattggcaatggtgcttgtatagttattataaacagacatataggctcatagtatcactcgactttcttgaatctcttttctcacctttatattccaaatgtgtgtgtgtgtggtgggtagcctggtgagacaggtaaggatgggtggggccatggagaaagactgctgggttactcccagcggtggcattaaggcaggtcaggtgatggaaggcaccacggcttagagaagtaaatggctcacaaatgacttaaaacagcgtctggcacaaaaggaagccctccataaatgtttgtgattgtggctataattacctagaaggcttggatcattccctgtatttgttttaagtctctctaatccctaggactgtgctgagcaatcaggacgatgtcggggggggggggtggattctggaagggtggaggcgaagccattctgggaactgtttttctctctgtgggtgaggatgagcgcacactctgacaggtttggctcacgcaccaggagctcgcatatagctacatatattagtctattcggaatgagacgtgaagaatattttctaaaccctggcagcatcctcgaactccagggaggttccctgagtgcctagggaatctgttgatgtggccacacagtgagcaccaggacatgtggcaccagtcctgactcagtttcctcgccttgcctctactggtcaggaaaatgcggatctctagcaaggacatgtgcaagtcattgctagagacatggaagttcccagatcgatgcaagcccgtgtgtggactgagtggagttgacttatatactgatgaacattggagtggagcctgagaaatgagtcaggtctgggaaagcttagtggcttcacttgtagacctcaaagtcgagattcgactatgatttaccagataggtggagtttcacgggagccctaacttgtgaacacattggccacctcatttatactaggaattccacaggggttttctaagagctaagtgagaaatgtgcctggtttctgggccaatcagtcaggaaaccaagccattaccttcattgtgggcgcatttttatttcagtcaagagggtccaacaagattgtgccggatggtgaatgtagctatgtgagcttaccaaattagttcatttctcattttaaaaaaatccatttgttccctttcccctgacagatgtgagttttggcaggatgtgtgccatgatctaccttcctaatgctgcaacttttaacccagctcctcctagagtggagacgccaaccataaaatagttcccattgctactttgtaacggtaattttgctactcttatggattgcaatttgtcttagtcagggtctctattcctgcacaaacatcatgaccaagaagcaagttggggaggaaagggtttattcggcttacacttccatgctgctgttcatcaccaaaggaagtcaagactggaactcaagcagatcagggagcaggagctgatgcagaggtcatggagggatgttctttactggcttgcctctcctggcttgctcagcctgccctcttatagatcccaagactaccagcccagagatggcaccacccacaaggggcctttcccccttgatcactaattgagaagatgccttacagctggatctcatggaggcatttcctcaactgaagctcctttctctgtggtaactccagctgtgtcaagttgacacaaaactagccagtacaattgaccccttgtcaacttgacacacaaacacatcactagtaagcctcaacccttacattcttattcatccccaaggtctaaacaactttaaacatcccacagtctttacatattcttaaaatttcaatctctttaaaatatccatctcttttaaaatccaaagtctttttacaattaaaagtctcttaactgtgggctccactaaaatagtttctaccttcaagagggaaaatatcagggcacagacacaatcaaaagcaaaaatcaatctccaaccgtccaatgtctgggatccaactcacaatcttctggactcctccaagggcttgggtcacttctccagccatgccctttttagcacacgtgtcgtcctctaggctccagatgcctgtactccactgctgctgctgctcttggtggtcatctcatggtactggcatctccaaaacactgcatgaccccttcagtcctgggccttcaattgcaactgcggctgcaccttcaccaatggccttccatggcctctcacagtgtcgagcctcagctgctctttgtgaccccttcatgccttcaaaaccagtaccacctgggtgacccttacatattaccaagtcctgctgcagcaggagtacaaacttggctatctctggaacacagcctctttgtgctttcagaaaacacttcccagaagacgtcacctcaacgatgctggtctcttcttaatcaccgctaatttcttagctccagctaaccagcatcaatagtcccagtaatgcaaagtttttgctttagtagttctggtatcttgttaatcacagctgattcttcagccccagctaaccagaactacagaatcttcataatcaaaacagaaatggccctgaaaagagtctttaatcttccctctgaaatttcacaaaccagacctccatcttctgcactgttctcaacattatcttccgagctcctatacaacatctgacagagctcttaacagcgaatggatcttcaagcccaaagttccaaagtccttccacagtcctccccaaaacatggtcaggttgtcacaggaataccccactctgctggtaccaatttgtcttagtcagggtctctattcctgcacaaacatcatgaccaagaagcaagttggggaggaaagggtttattcggcttacacttccatgctgctgttcatcaccaaaggaagtcaagactggaactcaagcagatcagggagcaggagctgatgcagaggtcatggagggatgttctttactggcttgcctccctggcttgctcagcctgctctcttatagatcccaagactaccagcccagagatggcaccacccacaaggggcctttcccccttgatcactaattgagaagatgccttacagctggatctcatggaggcatttcctcaactgaagctcctttctctgtggtaactccagctgtgtcaagttgacacaaaactagccagtacacaatataaatatctatggtttccaacagtcttgggtgaccctgtgagtgtctcttgacccccagaggcatcgtggcccacaggttgagaactgctgacagagagcactgcaggaattgacttaaccatctggtaattattagtgttggggtgagtctagaaccgcagcctccccagtgtcagctttcttcttgttccttcctggctgcattcttttatacttaaaaaaaaaataatgtgtgcatgtgtgtgtatacagttgtgcttgtgtgatgtgtgaatgttcttttatgtgagttcacccacgtcacaaaacttgtatggaggtcagagggcagccttttatgttgctccttaccttgtcctctttgcgaaagactttcccggtgagtaagccacaccagccacactagccctgatgtttctgatgacactctgtccctgtcccagctctctgtagtggatgctggaatgccggatgcagttatacagtgatgttattttaaagtgggttccagggagttgaatttgtgttacctggcttgcaggacacgtggcttatcactgagctatctctctagcccctatttacatcctcgcttcctgatgaaaccagtgagcgagtgagcgagcgagcattcgccacatcccggtgattccctcagagcaccaggacctgggcctggtcagtgccagtcctgtagaacaccaggacagcacagtgccttggcctggtgagtgctagttagacagcacactgcagggtagctggagagacgattctgtcagaaaggtgctgactacacaggcatgagtttgatcacccacacccatgtagaagttggatgtgggctttacttataatcctagtgtttggaagcagagacacaagagtcagacagctcaacggagtcagagagccccaattcccactgagagaccatgtctcagagtgcaaggtagggggcggctagagaaatggcttagtggttaagagcactggctgttcttccaaagaggctctgggtttgattttcaccatgcacataaccatctcttatccaagtcagatatctggcaccctcttctttctggtctccacgggcaacagacagtcacggcacatacacctatatgcaggcaaaatgttcatacgtgtacaataaaatttaaaaattaaaaaataaaatcaacctataaaatggtggcagctgaaaaacagttcacacagtcactctcttggctgcgtgtgtgtgtgtgtgtgtgtgtgtgtgtgtgtgtgtgcacatgatatgtgtattcacacaaacacttgtccctcacatctgcacataaacaaacaaaaaataagcaaacaaatatgctggaacgatgagcgatgtgctgacatggaagccatcactttcatctgatacgtttgttgtctgggctgctatagatctcagacgtcagtggtgagcctgtgtggggggctagtgctttgctttgtgtgagtgtgtgtgtgtgtgtgtatgaggggtggttggaagattccagaatgacctgtgtctgacttgggttcccaatttccatcttcccagaggtttcccgccagtccctggtctagtgattataaccacacagctaactgctttgaactgcagaccttttgtccaagtgctgctactgggaaatctcagataaaggataggtggtctgtggaacgaagaaaattcttacttcatttttttcccaatagcatctgagagctgcagtctgtccttagcacatcatggctactatgagtcatgtgcgcttttctgtaatagggccttggacaggcaaagtctttgcctaggaaatgataaacagtccaacaacaaagtacaggccagggtgctctgggtctccagttaagtcccaggcagacccagaaattaccacctcagccttcctagagtccccggttgagcagggagggagggactgccctgccctcactctgggtcaagcctgctgcagaagctcacagcccctccattttaagtagttccaagcaaggaaaaaaaagtgtcatggggatatccagacttgggcagataacagctctactcttacatcctagttattaacccataagatggggtagggagggtatggtttgccatcctgctcactcactggatgctgagccccttttaaatgtagtctgaataaaaacggggccccatgacttgttttgcccattagatagcattatctccacggagcaccaatccgtatctctttgtgccatgtgtggttttcacatacgggattttaataacctccatgctgcgctatgaatttataagcagagctgatggaggactggctccacgggactttattttttcattattactcttttgaaaaacggggctgtctcatttctgagcggcgctgacagccatggccgtgctgtggggagggacgcagctctcactgcagaaggggtcagcactttttgtggctgtctcctcctcattccctccgctaccccagtcctacacttagcagcctccattatgcctatgacactgggctctgggtggaatgatctcagagaagcctgcttcccaccccagcgctgggcttcatctatattcagagtcctgtttctgtgcctccttttaaacacgtttcccctccatatgatcctgcgtgttcaaggagcctccttggtagtggctaagatggcaggcttaagattatccagtccccagtcctggggaagcgtggcttgacagccaatcctttaaaaattgtctagatttcatcaactaatgatatcaataaaccttcaacccacgatagtgagctcgttcacggacacatttgcttggtgtttagcaccatggcgttggtgactgttcaaatgtttagtaactgttggtcagatgtcagacatcgtgtgggatgctagagtttctttgtgtttataaaaacaccatttgatcactttaatcaattatcagtgtttggctctgagacagaatctcatctcaccccttatacctgaagtcatcatccgatcccaggctagcctttcacttgaaaccatcatccgatcccaggctagctttgtgcgtgaagcagtcagtcatctgatcccaggctagccttacacttgaagcagtcatctgatcccaggctagccttgtgcttgaagcagtcagtcatctgacctcagttttctaagtgcttctcttacaggttgtgctacaacacatacccataattgttatcaagattaaagtttcagtataaagttacattttaggcatctttctaatagtacttaaatctcccctttccatttctctattaaacactcacatgaaaaacaattctgcaattttgtcagtaaatggacaatctaattctatcctcatcttatatattcggtcttcagacccatctctccttttcacggtgcccatttgaaggaatcggcttaaataaggaaaaccccacgagcctctcctcggcagctgtcatagcctttttcattacaaatccgagcctgttatagattgaatcctcctgactcaatacggttctttatctgaaatttcatattagccctcttggatgttaaagtaaaatgcaggttacaaaagcagtttttgaaaagtccaggatgggaagggtgtcaggggctaagcccttacatactcagtggcagactgtctgtagattcctggtaggaatctctggctaggtgtgtttttaaatgtgggtagatctacttgcatctatattcgacatatgtttgtgtggcctgggagctgagtacgcagagtatgtttgatgcctgactcttagctcagtagaaagttggaaatctgcgtgacccaagggctctgcattctgaagatgcctcacaagtcagtgcacttagactgtaagacatatgctctgaaaaatatcacatgctgtgcaaatgaagtgggcccgacttagcactgtgggtgacatgcagaaaccacactgttggtaaacacgtctgagcctttaacctgtgttgttggcacggtgcatctagctggacattatgaatttcagaatgctgactgaatgcctgctgggtcctgggtgctgttacatgtgtgtttttgttaccagaagtatggggtttggtgggagactgacagacaagtcagtggagttatagatcatgagtgggcttccatgaaggtcaaatgtgagtttctttgaagggcctgacttgagtgtcataggtggtcagtgaagacttcctgaggaagctgaagggacattcctggaaatggggggaagctgaagggacattcctggaaatgggaggaagctgaagggacattcctggaaatgggaggaagctgaagggacattcctggaaatgggaggaagctgaagggacattcctggaaatgggaggaagctgaagggacattcctggaaatgggaggaagctgaagagacattcctggaaatgggaggaagctgaagggacattcctggaaatgggaggaagcggaagggacatttctggaaatgggaggaagctgaagggacattcctggaaatgggaggaagctgaagggacattcctggaaatgggaggaagctgaagggacattcctggaaatgggagggggaagagagtgcagaagaatgtccccaggctttcagctgaggacagaatatggcgtgaccgaaaaccctcaagaaactaagtgtgctttgtgtatactgactgtgaccaagagagtatgggactaaggggactgaagccacttgaagagggagctggcctctgccagcactcttgtgcatgcaaacacactcacatatgcacacatacacatacactcacacatacacacaaacttatatacacacttttatacacactcacacatacacacatgcactcactctcacatacactcacacacacacacactcacacacacacactctcatacacacactctcacacattcacacatacatacacataaacccacacatattcatatatacacattcacactctcacatacacacacatactcatacatataacacttacacttatgcatacacacacacacacacaacctgaaacaataaaaaattatttacatgtgtttgtgagagacagtttgtgcctctgacttcagcttgctgggcttggttgcttgtgttcttgcactgtctgggccccagggatcagactcagaaggtgaaggtgatcaccttcagctactgagccatactgtgggcctagtttgtgtgttttcacctaagttatttgatgtagaagaagagacgaggcgtgtccacactttggggagctaaggcgaagggcccaactgccagccggctccgtgcatttgctttgtgcatttgatttacttctctgcttctgcggcatttgcacactcagccttagctctctgttccgtttattaagaatgcacgtaacttaatttctcctaacaccgagtgatttaacccagctgggtagttgctttccccaccatgaataatctgctagcgttctgcatcagtgtagctcagtgacctgtaaccccattccctcaacacaaactcagttatgcatatgattcttattttaaggggctttgatagattcccctgagctctcttatttataggaacaatttgtgatttatggtggttctatggtcttttatttatgtgtttgctttggtagagccaactttcattccaatgcatacttcttgagtatacatgggctttggatacacacactgctccacataaataaacgtgcatgattccataaattttgaagctattattatcttttctcttcaagataactttagaaataaaaggtattgatccagtgagagtgaccttgacattagctaatagagatggttgacccctctacaccattgatatgctattggtgactaaatgcttttctcataggatccttttcgattcccaagcttggctaatggtctctgtgacctctgccccagttatccagcttttagtaataagcaatagagcacaaaagaatctctgcagagaagatggctgcctctcaagggctcttggctcctaagactaactgttggtggctttgtcagagctcagaggagccaggctgctgagacctgaaaggctgagagggctttgccaactcaaaatgattgtgtgccttacagcgcctcagtgccagggctccgtgtgccaaggaaacaaaaacttgcctagaaaataaacccgtttcttttgcctcattctcttgtcgaagaagccaaacctgtatgtcttagttaaggtctctgttgctgtgataaaaaccatgaccaacaacagtgtggggaggaaagggcttattttatcttacattctcaggtaaccctccgtctgtgaggaaagttggggcaaggactcagggactgtgcagaggccatagaggagcatattggcttgcttcccctagcttacacaccctgtttttgaatacagcccaggaccacctgcccagggggtagcactgccaacctgtgagctggatcctccaacatcagtcattaagagaaaatgtcccaaagactttctcacaggtcaatctgttgggggcattttctcagctaaagttcttctcaggtgactcttgacttgtgtcaagttgaaaaggaaaatctaatcaggtcactgtaatcatcaaaatatccatcctatttaaaaaagtgaccagcagctggtctcttcagcgcttgcataaacactgcttaagtaacagggccttgtctcattggaaacataatgctatgacttcacacatacagcaagatggctccacacctagcgaacccctgaaggtgcaaggctttattctggctcagggttcacagggatgcagcctccctcccccccccccccccccagctctcttctttcttagctctcttctttcttaccgtgtgtttcttttgaatctgtcttgtttcttcactgggatgtttttccccatctgattttcctcagatgagatgaatataaaagagaggcatgaatgtgggatcacatgtaattcaagacaaatttacatttaatacaatcctccctgctctgaaaagataatctcttgagaaaaactcagacaaaacccaaacacaggaaaaaaaaaaaaaaaaaaaacctcaacatggtgtgtaggaaacctaatatcgttatacccactgttttgttgtttataggaatttctttctttttaaaaaatgtcttgtgtatatgtgtgtggctgggtatgtgcatgtgcacacatgcatgcaatgcccagggaagccagacggaggcctcatgacagcacccccccccccaagctgaagttccaggcagatgcggtttgggtactgggaattgaacctaggtcctgtggatggcagcttgttaccctttagccctctctctagatctcctttatttctttggctcatgggttcctcagccagtttggactggatcactctgtcaggggatggtggggggaaggggtgttggctatagggactttaatagcatccttggctactgcttattaaattcagtcagtgttcaccaattgtaacagtcaaaatctcagaaggctgacaagatggcacttgtcaccaagcctggattatctaagtgagattcctcagaactcacaggttggtagggagaagggctgtctctaggcctttgacctccacatttatgctgtggtaacacaccctcatacacatacatatacacacaagcatttacatgcacacacacatgtacacatgcatgcacacacatatgcatacattcacacatgaacacatatacatacttatacacacacatacacatacaagtgcacacacatcatacacatgcatacatgtacatatacagacactcacatacacacatgtatgcacacacacatacaaatatacatacatgcatgtaaacagacatatatgcaaacacaagctcatacatgcacaaacacacacatgcacatgcacgcacactcacacaggcacacacacacaaatcactaagtagactactgtttaaaagtctgcagacattgttcagtgtttcctagggggtagaaccatcccaggtgataacagcaatttcagactcacatacttgcaagaagctgaattaaccaattgtgcagtaagcatggtatccttttctttctcccaactcatctcattattcccattagcattcacatctcaaagctaatgtccaatgctggtgaagtctgaaaagttggaaagtaaacatctccctctttatttgctaagttgtccagcaatgaaaatctcccagttggagagcctgttaagatgtattctgtcagatgaaaagggctattttaataactcattatcattcttagcatggaccttttattttagaaaaaatagataattagcattttggcttatcgctttctcttcatgaatacaaataatttgatagacagacaaccaagagagacttcattaaataatgggcctgaccagctggggatgggagtaaattagaggttagaattcagcctgggagttggaacttggggtttggtgacagtgtcattcattatccagtatgtttttgttgactgacctgatgctgcagcccagaaaccgagagcacgtgtcagctggtgagaaatcagaggctgaactcagctcggggagctgttggccacactgcatttaacctgcagctggccgaggcagcaccacaaggcctgcgctgtcctgacgtctagctgtcagcccattattaatgtggacatgctagaacttcttccagagaaggagcctggtcctcaagtcgttttctcccgttcattacacaccccaccgctatgggtggtctccgaaggggacgctcatagtcttaaaataagaccaactaacatccaaccaagattccatcctgaagttagcttcctctgaaatattttagaatagtttatcttttggaagataccaaatgctgtgttgcggaacaacctagaagtgccttgcatggagacgagacaggtcaccactggtagactgtccccaactgtcttttgaagcttgtcggtcagacttgagaactgtgttcccagtgttttcttggtgtgtcttctgtcggggagtggagtgggagggttagatctgaggcatgattctcgccatgagttgggagaaaaacttgattcgcaattcctcctctacattcattatcctgctctgtgtacccaaagcagcccctgatgtctcccccttgacgttttcctgagcagcatcttcccatgaagtagacttatgccagaaagacaaatgaaggtatcaagcgcatgatgtgttcccagacacatttggctttattgctaacatttcctaagaaaaataactgagagctgaacctgaaacggagcaatttagttcaccgtgttgataccccgtgctggagacggagaggccccatttgcccttataaaaacgttatgagtgcttatgttcataatagtgcagttcattattgatcaataccttacaactgagaggtgtagaccgacccacattgctgtagggcttgtgtgtgtgtagtaaccttagtgaggacccagtggggagggatagagactagcatgcacaccgtaggaactgacattctgggtggagagccctgctcccagttgctaagatatattgacaaggcttacgttgtattcaattttattttagattgttatgctcagatacaaagcccactcataggtaaccgagaaatgggtgtgaaagataaaagtatttgggaaatctgtgtcaaaacacatgtgtagggagggagtggcaaagtggggtttgaccaggcctgatggcagagtggggtttgaccaggcctgatggcagagtgggatttgaccaggcctgatggcagagtggggtttgacaaggtttgatggcagagtggggtttgaccaggtctgatggcagagtgggatttgaccaggcctgatggcagagtggggtttgaccaggcctgatggcagagtggggtttgacaaggtttgatggcagagtggggtttgaccaggtctgatggcagagtgggatttgaccaggtctgatggcagagtggggtttgacaaggtttgatggcagagtggggtttgaccaggtctgatggcagaatcagctcttggtttgattccagtgtgttgcttgaggctggtcatgagctttgcatcaccctgacaagtattggagagacacagtttttaaaagcttgattttgtgctcacaggcttagaggtttcagactgtcttggttaggttactactgctgtggtagacattatgaggctttgttttctagatggggttcttctttccagattactatagcttgtgtcaaggtgaccaaaaaatgtaaccaggatactgcccatgacaaggtaacttccatacttgggcatgtggtagacatcctggcagagacatacagaaagggaagaacattgtttggggtgtcatgtgacttgaggtgggtagagcagtgtagagggccagagcactgtggagtggggggatgaccatgaaggtagaggagcatcatggagatgggagcatggtggagatgggagtggtgcaggtggggagcatcctgacaggagcagctttgtgacaggggcagcatcctgacagggggaatatcctgacagggaagcatcctgacagggggagcatcctgacaggggagcatcctgacagggggagcatcctgacagggggagcatcctgacaggggagcatcctgacagggggagcatcctgacaggggagcatcctgataggtaaacatcctgacaggggagcatcctgacaggggagcatcctgacaggtaaacatcctgacaggaaagcatcttgataggggagcatcctgacagggggaacatcctgacaggggatcatcctgacaggtaaacatcctgacagggaagtatcctgacagggggagcatcctgacagggggagcatcctgacaggggagcatcctgacagggggaaggaacatcctgacaggggatcatcctgacaggtaaacatcctgacagggaagtatcctgacagggggagcatcctgacaggggagcatcctgacagggggagcatcctgacagggggagcatcctgacaggggagcatcctgataggtaaacatcctgacaggggagcatcctgacaggggagcatcctgacaggtaaacatcctgacaggaaagcatcttgataggggagcatcctgacagggggaacatcctgacaggggatcatcctgacaggtaaacatcctgacagggaagtatcctgacagggggagcatcctgacaggggatcatcctgacaggtaaacatcctgacagggaagcatcctgacagggggagcatcctgacaggggagcatgctgacaggggaacatcctgacaggggagcatcctgacaggggaacatcctgacaggggagcatcctgacaggtaaacatcctgacagggaagcatcctgacagggaagcatcctgacagggggagcatcctgacagagaagcatcctgacagggggagcatcctgacaggggagcatcctgacaggggagcatcctgacaggggagcatcctgacaggggaacatcctgacaggggagcatcctgacaggggagcatcctgacagggggagcatcctgacaggggaacattctgacagaggaacatcctgacagggggagcatcctgacaggggagcatgctgacagggggagcatcctgacaggggagcatcctgacagaggaacatcctgacaggggagcatcctgacaggggtgcatcctgaagggggaatatcctgacagggcagcatcctgacaggggaacatcctgacaaaggagcatcctgacagggggagcatcctggcatcctgacaggggagcatcctgacaggcaacatcctgacagaaacacatgccagagcagcacttggccaggaagtgacacaaggaaagaactgggcttccacagtgcccttcagtgacctgaagaccccacactagtcctcccttaaagctcctcccacagatgccacttggaagccatcacttttagtgttgctcatttgaggatggctatttatcaagcacattggcgaactgatttgatgaaactcttcccaagatgttaagtcacgtgagctgcgctggaagtgtgtggggtgaagtgctgaagggttttgatatcaagatttattctctgtgactcacatttttatgttaagctgtcaacatcatggtattaattgcttctattttaaagcccagtcttcataatttaaccaacattaggaagtatatacttttggctcctaaaagataaattgtgtagtcacaccatgctgaacttcctattctctgtactaaatgaacatgtggctgaaataatcccaagattggaactgtcgcctgtgctccgcctgaacctttaggcttcagaattagtgacaattacatattaggaatagagaacagtagacacacacccacatccactccaccccacacacaaacacacatgtacacatacatgtacacatgcacacatttgaataaaaagtaaagcatttggtcaagatagaaaacctgggtttgttccctggaccctccatggtggagagagccaatttcctcaagttgtcttctgacttctacatgttctatggcacatgggaccacatacacatgcacaaataaaatataattaaaaaatggaatgaggcttgcttgcatgttgaattgacttgactttggctttttatgaccattggtcaagcgtaagaaagggcataccctctttcctgtctgctttctccctctggtatgttttgtaaagacaatgatatgttttgtagagtgcagtatgacagtatggtgtagtgggagagggtacctcagtgggcccatgctgaggcatccctcccccatgaggtaccagccataggacaggtctagcatagaatagagtttattttgggccatgagaaggggagttgagaagggagtagaggtagaaaaagagagggcacaggaaaggacagagagaaagagaaggagagaatgagaggaagaggaagaggaaaggaagaggctggacaggaacaggtggagagaaaggggagggagaaagataaaaagagttagagagatgaaaaggtcagagaaagggaagagaggccaaacagtccattttataacaagctaggtctacctggctgttgctaggtaactgttaggcggagcttagaaggcatgcttttcttcttccttctctctccgtctcccactcttccatctgaagtcacacagcatccagggctggagacatcccactgttgctccgtatcaacctcccacgggagtcataaaattaagacccataactttttaggagattgtctgttgttttggacccagcttctatacaagtcctgggcagtcctgagaccagtctaagttgatactgtgttaggtgcctcagtaaaattgaagtcataaaatggacaattaaaacaagaaaaaagatagtttcagtacagtcaacccagggggcaagtcagcaaggccaggcatagaagttccctcccagctttcatggggaaggcaagtggctttgaaatggttgatgcagagttccacatatcccaggaaagtcttaggctcacttttttagccaaggatagccttaagcttcttcctctgccacttccagggaattacacagggaaccacgcctggtcaggaggtgacacttgtggatcaaagggcgtgagagcatcgagccaactgagtgaggtcctcagtctgggtcctttcaccattgctcgctgtttctgccttcattagccttttctgtctataaagccaccctatctgcctagctctgtggagcccacttttgctttaggatgtaatggtattggctcacgaattgccaattcccagctcctcagcactcgccttgcattcagttctttaattaatgcccccattgctcatcagaatcatcacatgacactcatgagtaactttgagttcccaagagttttggagatcagatccaagaaagcccctggtgtggttggaatgtgtcccacagggttaggaactgaatcctcctaacatggatgttaaatggaaggacttctgatgactgcttccccactgcttagtgggagatggctgtggttggaatagatacatgataaaggaggagtttgctccctaagtctgatctgtgggtgcagagtcatagctttcctgcccctttacctctgccaggagatgaagcaaacagtaagggttaaatggtcagtggtgggtgactcagccttagcctccacagggaacagtgggaagcattgggatgtatgtgtctcaggcaaaggatggaagtgccctgtaactgctctcaaggctgagagtatgcacagtgtatgagttcaattgccctgtgcataaccagcttttaatttcattttgggtcttctaaactctgagtagaatctccagtttgtctagtttctggcaatattcagttttagctaattgatatgcttttcatggtcacagagactgcgcattttagaacaccacttcattaaagcattaaaaatactgtgggctcggtaatttcatttactgggtcagtaacccatgatatctaggagaagatttaacatagttttaaaataattattcaaacaagataaggatttcaaactataattaccacaccagtaaaggagctggggactccaaagccagataaatattatatctaaatcttagttctagttcttaaaactcacagggctttcactcatctgatagtacagatcatgagaatcttctcattttcagcatgcagatagcctgggcatagacattaaagtttttgcttaagaagcacaaaggcatttgcaataaacatgcagaacaaacgccctgctgtggtctctccagctcctccatacagttctcctgcagccttcctgtctaggagtttatatttttgttgatactatacattatatttccccctctcttttaactgatgtcctgttagtgagtttgtctaaccataccacattcagctagctaccgttttataaactcgtagtgattctttgcttttctcccagcctattgcatttgtatctatggaagctgtatggggatggctttctttttattttgattttacgtcaatatctttctttcttcactcagtggcctggctttcttggtttctcagtactattaacaaaatgtgtgcatcagaattccgtagttatcgtctaaaacattgtctcttgttttcctgtgaagtgggaagggagagcctccggatccattcctgaaatcagcccgtggataaacttcacatgggatggactttcatcctggtacaggaggaggctaacagtgggtatcagatacactggaacagggactatggatgcttttaacctgtcatgtgggtgctgggaactgaattccagacctcggcaagagcagtcaagtgctcttcactgctgagccatctctccatcccttcactgttattccatatgtttacatagtctgtatatatatatctgcacatatatgttacataatcacttcccacagcagtgagtaagggtccccctcccctctccctgcatccttgacaccattgctatttattccttattgacaaatgatttcctggtcattacactctgtggtggccatttctatttattccttattgatgagtgatttcctggtcattttagactgtagtggccattgctgtttattccttattgatgagcgatcccctgtcattacgctgtggtggcatattgaacatctttgtccctagccgagagcaacatgctctgatagacactgagaacatgctctgacactgagaccatgcgtgtaccagttttcttgctctctgtgaagagtctggattgtgtattagagcgaatcctgagttatcttcctggagggagaggaagagatccatagggaggttgcctctgaagctggcccctgctcagtgtttcctagttgtaatagtagacgatgagttatgtcgcttagccagggcctcggtgggaatcttgcgtttgagaagactcttctttgcctcccctggtggaggtagcaggctccttttgcagcatgcctcaggattatacaagtctgtacctttgaggaccttcaattaaagggaaatatgtcaactatggcagccgagagcacagctttgtgttggctgtggtagaattatttcttgacattaacagttttatgcagccccatattaagttttatgtctcgatataatgccaccaggtagaaaccaaagcaaatgccacatcccaaatccagagagagttggagccaaacagcgggttatcaaatctgtatctttatgtgctgttcctcgtcacgggtgatttaaacccacagctctggaagctgcaggagctgtatggtgcagctttgaggagggacgaggaaccgagcctggcagcctggcttggctgagcggatttctccctagaacaatcttctcagttcttggcacactgaggttactcaaagaagatggaaacagcttgcttaatcactcctgaaacaagggaagaagaattaaaatacatttttttagtttgtcaagcaatgaaaacaatgccagcttgttaatgcgtctcttgtaccctcccttgaagggccttaaagaacacggaggaggggaaaggcagaatctattccctgatggcgtcattatttgtgtgtggtgtggcttctaagactaaaactctagagatgtgaagccgtaaatgacagcagaaagagagattgtccccagggcttgtcctacgtgctttgttctgattcattcaaattggttgatgaaagcaaaggtctcatttgtctcaacattaaagtagtaaattagcagtcatctggtccctaattgtcctggaagacactgaaggtgcagtagggccctgtctccccatcttaatatcacgttgcttcagctgaaatgaagcaactattagggttgtgcaaagcagtgcttttaataatttaggctgctggttagattcaagcatgaagggcttttggtttttttgttctttgtcctgaaatatttatcgaagctcctgtttttatttgatgtggacaagtttcctttcaggttccaagctgtaaatggaaattcctatccagcacggggctgaggtagagagcggggtgagagttctctccgagtctcttccctaccatctctgcctgctgctaggccccggcgttcacagcattggtcaaatttcctttagttccttggtgaccttttctaatcctgactgtttcataatttaatgttttgacctttgttttccactgagcgatgttagtgatgtatgcagagatttaatgactggaagtcgctgacaggtgacctttcatccatgactattcctttttgctggggaaaccacactggtttgtaggttttatttcacagattttaattgtctgtaagcttgttcggagggaaaagagtaaaggttaagtatttcattcttcatactgattaaaatgtaaaagggctggcagttgtcccaatctatcattcaaaaagggtagagcaatccgcccagctcacactgggagaagagtgatggaactttccagaagggttggtgaggaggatgaaaggaaacctagaaaagtgagatagcctacagtgagctagcccacccacctggatgaagacagcaggggtgtcctgtgtgtgcacactcatgtgaagtgagctagcccactcacctgggtgaagacagcaggtatgtcctgtgtgtgcacactcatgtgaagtgagctagcccacccacctgggtgaagacagcaggggtgtcctgtgtgtgcatactcatgtgaaatgagctagcccacccacctgggtgaagacatcaggtgtgtcctgtgtgtgcacactcatgtgaagtgagctagcccacccacctgggtgaagacagcaggtatgtcctgtgtgtgcacactcatgtaaggtttggtgtaggcaggcaggagcagggaagtggaagggttaactgaaagagaaaagctgctctttacaggtaaaatgccagtaagggcaagtgacctattagcttcccttcttccctctctccgtccctaacccctccctcccttacttctctccatttcttcctgttttccctttcttacttctgtcacctctcttcttcccttccttcccttcccctccgcttccattttaaccaagcgaggatccacttggaaatgcattggtaaagtgacgtctcaagtctccatactcgatgcacattgtataaactcagggagccaaggctgcttattacagcaccctgaactcacagagatagaagaacacgcatgccatgcctccctctcacctttctagagcctggggccttctcagggaatttcttcgcctgtgcttgcagtcttctgcttttaaaaagcaacccagttttgtgcctgtcacatacacatgcttttaatacaggaaggaaaccggaaatacacatgctgataagccttcagtgtaagaagggcatcttcgtgtctggaggagggagtgactcccgagttagagaataacttgaccagttagccacctgcctgtctgaagagggtgcacaggagggaagctttgggaaagggagggattcctagtggtgatggagaacagtttccagcatcatcatctcctgccatgctttttgtttctctcccagccaaaaagaaatggcttgaaagaaaattgtgtaaagagatgtaaaggaccatccaaaacagaataaagtgctcgtgactagtttatgacggattagaattttagccatattagaaatggaaaatgggaaggaaaaagattccatctaagtatttttaacatttaagggctattgcaggagaagagaagttgcttccttcataagcacgccccagagaatccctggggaattctccatccccttggcagggcgtgggagaggatgagacgcaggccacaactctgcctcacttccaggaaactcttgcctggcaacgcattctgtgtgtgtgtgtgtgtgtgtgtgtgtgtgtgtgtgtgtgagagagagagagagagagagagagagagagagagagagagagagagagagagagagagtttgtgcctacgtgcatctctgtgtacacgtgggtgcatgttccagcatgtacctgttgaggaagtatgcatttctgtgtgtgtgcatgtgtgtagacaccaaagtttccccttgggtggagttcctagggagctgtccaccttgttctgaggcggactctcccagtctgattgtcttggaacttaacatgtattctaggccagctattaagctcagggactcacctcaggtcacttccctggcattggacataggtctctacatctactttcttactgtctgtgtcattctagggaatcaactcagtgcttcatgcttgcattgcaagcactttagcaggcaagcttgctctcctgccccatgagtgagtagtttttaacatagtgctgagtgagattagaacatatatgtatgtgatgattatgccatatgatagttattgtattaatcaattatattaatctataggatatactaatgcctcatttcttggtactgctgtgagcataactcacgacacacaacgcatgcctctttttgtattaagaaagctatctactatccattggacatcttgatttattcaattttataacagagaatgaaaatcaactaaataaaaaggaaatctatttttagggactgcttgttgaatcctagcacttaggaagaaatgtctgaagaatttctctcactttgaagctaacctggtctatagagagttcttagccagctagggctgcatagctatctctgtctcaaaacaaaatgtctgttttcaaatcttggcatcactatggccattctcaggcctgtcttccgataacccaggggacagaggcaggaggattgctgtaagttcaaggccagctgggtctacacaatgagttccaagttaaccaaggctacatagtaacacactgcctgaaaaacaaacaagtcaacagactaaaacacccattttgaagatcaagtttgattaacctaataaatgctgaagagatggcctgaatcatgacaggcatcagtcatggccaggatgggcagttctatccaaaggcctgaattgtgacaggtgtcagtcacagctaggatggacagctgtgctcatatattctcagactgatttcttcttgtgggctcatctgcctcctctgccccattcaacaatgaagaaataattcttccttgtagaagacgaaataccaaggatcattttggtgggagatgtcttgcttttccaggcaagcccttaggcctctgacacagcctgggatggatgcagcagactacaggacttcccacacacatcagagctgggtacggagattaaagtttaccctgattagaactcaaaatgatcagtccttcagagcaccttatacagaatagccccatgaagaaatcatttggttgtcctgtagatgtcaccaaactaaactgttgcccaactgagtgtttattgctaagtataatggcgtggagttgatatagttttgcaagaggaggaaatgcctaaaacaaatataggtttgcagatattttataagtcagtattttagatctcaaataaagtgtttggcatgtgtgggttttttttctgtatgtgtgtgtgtgtgtgtgtgtgtgtgtgtgtgtgtgagagagagagagagagagagacagacagacagacagacagacagacagggcaaggaggctggagctcaccaagtgggctaagcctgtgagctctgtgaatgtgcctgcttctgtgtcttcagtgctgagattacaggcatgtatcaccaagcctatcatttttaatcgtttacattaatcccagaatattaaactccaagcaagcacttcacccttcccccactcgtgggttttctttaacagcagtatagctgccagacagggattagttaaatttatctggtgttcttcacccaagcaaaagattctaaaagatgttctgatacaggaaacaaaatccaagggtgtattatttttaatggaaaaaaaaaagtagagatgattcaactgaaaagaatttgaaattaagatgaaggttgatgaattggaccagataagtcttaacagacaaatccaggctctcgatctaggaagagagaggcactgattactgaggtggaacaaagccacggagacgtgtgtactacatttgtgctcaaccctcccaaatcaaacacgaacgagcagagaagcagcaatgccttaacaaagaaagctgagatcaaaagacatggggacagagctaataaaagagatagggatgaccaggcgaggcaggtcttgactggccaacaacgagtacgtggcctcttctttcctttcatcatggatcgtagtagtttgacggttccttcaaacacatggatgcatcccggacatcattccaagtcttctggcagcttggagcgtccgattctgatttggaaggtgttacatattagctcctgttcttctgccattctgctctggccagtggagctccgagcacgtgcctcgcctaggagtcagcgagctaggattggggccaatgacgcaccagaggaagtctctaaagactctagtcagggtgacgcagtcatccagtcaacagtgaaaagatgtggttagtaaaaacatcatctacaaccaaagctactgcagagaaagccctgttctccttcccgcacatatttttcacataaacaacaaactgttggccccactgttggcccttgagttgttagtcagctgctgacctcataatctgcacagctgtggcttcccagcgttgtcatggaacagattgggatgtctaaatggatcactttcagaggttacaattgtcaagtgagaccagcctgctgattcttattagctaaatgaagccgtgttacagcagaactggctaattcattctaatggctgggaaatccaatgcaaattgtcacattttacaggacacattcaaagcttttcttgatgatttttacctctgtgcaggctgtaccccaaatatggttttattgcccacttaaggaccttgttgggatgaacagtgggatgtgatcacgctgcccgtgtgcacggtggtggtgtcagagcaaaccacgcaacattcggtgtgtaatagacacgatgagcatgattcacgatggttgtaggtaatgcctgagtaatggctgtcaagccctaccaaaaattgaaaaagatcgtacttgtccatgctgtctgaaagagtgttggcttctaaaggacaaagaaataccttagaccacacctgatccccaaagtcaatctcttgagcctttatttaagaaaatgtttgtggtagagctggtctagaacctatgttcacgagtcctaatgtattcctccactttggacttccgctaacttggtagctgatcttcgtgctgcttgctgcagcttgtcaaggtgatatgcaagttcttttctcacacttgtttgtgtggtagtgcaacagatatcccagactagcctcaggctctctagatcaccaggatgaccttgaactcatggtcctcctgcctctgcttctcaaatgcttggattgcaatatctgtcaccatgcctgttgaccacaaaggtatttataaaaaaatgtgtatttttattgtatctgtgtgcgtgcatgcatcttagaagtataccatgtgcatgccaagtgcccacagaggccaaaatcaggtacaggaccccatggaaccagagatccagatgattgatccactctgtgggtgctgagcactgagtgactgctcctatgggtgctgaacaccaagtcggtgctctatgcaagagcaagaagcacttggggtagctgagccattcatctctgcagcccgattgtagtgctttaaggcatctcacaaatggattcgtgggagtctaaccggtcgtgctttttctgattcttagttgtgacaacatacacggatgcctttgccagcgtgtgcatgctacagcagtaaagaaaccaaaggaaacaagtttatcaaacacagtgactgttggctccaaaatactccaggatgtacaaggatgtttatcaaagtatttgtaaatggtagaaaataaatcaggcaatagctggatttccagagtgagcagatatatacattatggcatatatatgtagttgagcaatgaacaggtactaaaatcttccctaaggattatttactgatatgggaaagaccaacacgaaaacaaaaggaaaccaaagatgcctagttgggtaaatctaattttttacacaacagcccacatagataaaggacaatgtggtgaaatatgtgtgatcattgttgagtgatagaaatctgaataactttaactatcctttttaaattttttaagtttttcatagtgagtccatacttctttaataatcatggtaggacaactctttaaagcagtttgagtagatttgttaagagtcatactgtagtggtctttgcttcaggcatcatccccctgcctaccttttaaacagactcttggttttcccccctggttttattcctagaaaccttcctctcatcctagctggaagctgtgctagtctggagtggctgtggcagaagcctgacataactcttcactcgtctcccctcgcaccagcttttcacacattcagtacctggaccaacccagaatatacccagaagtttgtcggcctctctgctttcccgtaccacctcctgtcttctcatcacgctctcttctctgtgggagcagtcacttgctctctctgtttcaaccttcttctcttatgctccgactttccatgtaacagacaaagttgttaagacacagttcaggtcatccatttctcttttgtcaaagctctccactgcacaggaagccagaggatgcaagtaatgcccagaggcctcctttctgcacccagtgcctgcttggtgtctgcatgggctctgctgagtgcttctttcttcatcgccatctcctgcctaaaggatcagcagcagtagctttgcattgccacccacactggagttggccttggtgatgtctttgagtcatttccacccagtaacccttcatggctagtgattttacctccctcgtacactctctcagcagtgcctttctgacatttcttcattgctcccagtgcacacacagacacattcacatgcacacacactatatgcacacacagacacattcacatgcacacacactatatgcacacacagacacattcacatgcacacacactatatgcacacacagacacattcacatgcacacagacacacttacatgaacacacagacacacatacacaaacagacacactcacatgcacacacagacacactcacatacacgtgcgcacctccgaagtttccatgttgcataaatttcttttgtgaactgatcaccgtctaatatattgtgcaggatgctggcatatttattgtgtgcatgtatagaagtacaacttaaatgtgcatttcattccatcaggaattcttgtgtatgatttcttacctcagctgtaactcttggaactgtacctgctgtgtggtaggcacccagaaactgctgggcagagtgccagcaacaggaaaggtgaccaatggccactgtgtggtgattgtccaagtgacttttctgagttgcttcacctgccattttttccttagcttgattgccacagctggcctgagcctgctgagtagctgacctttcctcttgattgcgtttctcttcccacctaaatcaacagttccaaactaaagggggaagtctgtttcttcctagtatttagctcagttttcagactttttttaaaaaaattacttcttagagagtgtcatgtgtatttcaactgtatttaccctcacccccaactattcctaggtccccttctctttcctgtccatccctagcaatacaaacaggaggtggggggggggggcagttttccttaagagtatatcctggcaaatcaagtggaagaccatacatctgagaatatttgggtaccacaaattggtctctaaggatttttttaaaggatataaagtgttcagactcttaactgattgttttaaactgatgtctttaattttctactttaacaaattgagctgctactgcatccctgttgaagtcagaggcaggcactatcttacaggagttcagtgtcccgatggcacatagtgcaggagtgaacgaggggcaggaccctgtatggatgaccctcttctccagtaggtgcaaaatatatttgggttcaagctcagaaccaaaaccatgtaatcttatggtggatgagaaggatgaatatcgcctaagtgtttctttttctgttttgaagatggagtaatgtcttcctgtgggaaagaagtagcaaaagttatgtgtgtggttattttagaagccaaggaaacaggatgctgctagtagcagtgagcccttagtgtgagttagaagattgatatttaggggactaacagatggcttagaggtctagaatgtgtactgctcgtgcaggggaccttagcttggttcccagtgcctagatcaggtatgttacaacagcctataagcactgagaggatcttatcccttctcttggtcaccataggcatttgcatgaatatattcacatatagagagagacacacgtatacataaatactaaagaaataataaaataaatctaaaatgaaggaactctagacttagaagatatagaagttgtaattcggaagatccagatttcaaaggcgagggcttggctcaaccgctgggactggtattaactaatcaccctggacatcagtgttttgctcccaagtcttcgttagttccatgcagacatattcagcctctaacaactgcatgcgtgttctctccatgttctcaagagaggccttaccttgtccatgtaaaaccaacataagcccagaggcacattaataggatgacttgggggacttttaaacatcagcataagactcgggctgttttaagtgggtctcgtctgtgtcctcttcatagtattatcagctgccacctactctttgcatacatagcaccaaagttcaaaatgcatgacttggtatataccactggagtttcttttatagccactgtccttatcctagaaatagcttcatactttcttatcactggaaactatggttctaaatgtataaacctcctcatttagagagaaaaggcatgactgcttctccacatgattttgaactaacatagggatgcagacagtcaagtcatctttccaacaggatgtatttacttttctaataacagcacaggtccaataaaggctacacctgtagcagagactgtagaatagagatgtgtcagtgataactccacactcattcattgtacactaatgacattttgattcctcaagcactcatgggaccacactcttcatttttctctttttcagcctttgcaactgaactgtaaccactgtgccatcgtgtcaaattcaggtcaaatggtcgggcagaaggtgggggaagagatagaccatgcatcctgcatctggagaatgaacaacgccccaaccaagggctttgaggaagatgtcggctacatgacaatggtccgagttgtgtcacataccagtgtccctctcttgctgaaaaatcctgactattttttcaaagaagcaagcaggaccatttatgttatctggggccctttccgcaacatgaggaaggatggtaatggcatcgtgtacaacatgttaaagaagacagttgatgcctatccagatgcgcagatctacgtgaccacagagcagcagatgactcactgcgatagagtgtttaaggatgagactggaaaggacaggtgagtcctctcaaacagcctagtcgacttttactgtcttttatggtgcatcttagccgagtccctctgccggctgtcaagtgaacggagttattttttaaatagaccactcagtgtttctgatcattatgattacgtcatgagccaacacagaggtcccatcgattctgccttctgttctctccattttaataggtttgaggctctgagaaatggtggatagttctctaggatgtctttaggtctcttcctatgtagctcagtttgatattgattaaattggatttttgttttggagaagtcttcactacagaaatactcaggaatttcaggattttaacgcatgaaaattgtggctccttctcccctctgagacgagagatagaacagactattgaccgcctagtgattgcacagcttcatacataccctgtgttcttgaatgctgcacattagtatccaatacactaaccagaatattgtattgaacttatgtattactggggctggagaaatggcttgatggttaagagtactgactgtccttccagaggtcctgagttcaattcccagcagctacttggtggctcacaaccatttgtaatgggatcagatgctcttttctagtgtgtctgaagacagcaatcttcacacacataagataaataatcttttttaaaaaaggaaattatatactacttaaaaaccatcaggattaggattcttttttttaaaatattttttattacgtatttttttcaattacatttccaatgctatcccaaaagtcccccataccctccccccccacttccctacccacccattcccatttttttggctctggcgttcctctgtactggggcatatacagtttgcgtgtccaatgggcctctctttccagtgatggccgactaggccatcttttgatacatatgcagctagagtcaagagctcaggagtactggttagttcataatgttgttaaagagatatacagtataaatacccttcacccatttatctaaaacccaaatttcctttgtgtgtgtgtgtgtatgctttcctgtcctggaccctgtcccgactcccttttcttgaaccttcctctcattcctcccttcccccatcttcctcttcctctcctagctccttcatagccaagcctctcaggcagctctatcatctgctggtttttctgtctctttacaaagacagccagcacaagtgggggaagcaaaatgacaaaccgatcaatcttggctgatgtttctcgctaataaagaattgccgaagaagatcagaaaacctgtgcctggagttttgaattatatgtgaattttgcttatttgtgcaataccatgaataaattgagcttcaagtttaattgcagtaccaacattctgatttccttaatatgcatgcctgtcttttactactcaatattattgaataggaagttataagtattgggcatgtgcttgtggggagctgggttttgctgtctccaggtgtaatttcagtgcttattatgagctaccagtcttggcagggaggttttggtggtctgtatttccagctcactatcccccacttccacccaaaagagtgccttttcaactttcttaataaatagcataattcattcatattctctctctttctctctctctcttcctccttctgagcccttaaaatacagcttcacctgaaatgcaaaacagagcaacactgtaacagaagcccctcttctgcaagaagaaccttgaaggttagatctaaattagtgtggcataagccattcaaagagtcgggcgatggagataggcagatctggtgtttgcaagaactgcactcacatgtggcaccattctgtacaaacgtgatcatcctctaggggcttctgaaacctctggtctctcactagccccgagcaatgcaattaattagctgtatttggtttttcattacagctatcccttagggtatccctgagttacaacgatacgcctggggatcatttggggggtatcagagaagaacttagtgggctgtttggtcgtggagctcatgcatattggcctttactgtgagcttccagaggccctgtaacagatgtgaggttgtagagcaatcggcaagtaacatcgggaggtgttttctatgtctatgatgggaaaagctgcttagtgctatcttggcaaagttaatttgcagattatcaatcaatggggttacaaaagctaagtttcttttaaacgtcaaatgattttatggtacatctttcttcttttttttctttttctttttccttttctacttagtgtcatctccctagctaccacggacaagggtttaaaatgcacaggtagaatcaggctgctcagcttgctgttggcctcaatggcctcaaaggcttccatctccaccaggacttaaatctagccttgtgtgtgttgagtataatgattcctgttgttctctggcacacagtgacaaatctcaagcagtatctctgaatatgtggatatgtgttatacacatgtacacaggtggcaaccagaggtagaactctggtcacttactggatgagacacggtcttttcttgagccagagcgtatgatttcggcaaagctgactgagcaacggctcacaggaatcagttctggggttgtagacattcagggccatcccagctttttcgagtgttttggagatttcaactgaggtttgggttgcagtaatggttcttaaacatagccagattctcagcatcaacaatatctcttaaaaacttgttgtaagaaaaatgtcaaactcgcagagcagaggctggtagtgcctttatctccgtagagccagtcctcagcctgaggagtgactaacttagttcagatgtatcccacacactgtcttcttccccaagcagtatcttaaagcaaacttcacacctcattgtgttccatctttaaatatcactgcgtgttttaaaagacaaaagaaaaacccacatcgtacatggaaatgcaaacatgcccttgatagcatcatgtgtttccttggcttgcagtggtcgacagttgtctggtacatgtgattcaagcattagcatatggtccatgtatgataattgcatggtgtagttccagtgtgtgtatttacagtgaagccatttccctacaccacttttcattgaagaaacccagccgcctgggtgttttaccatctagttagttttattaacttcacctcatgttatttcttccacgttggtttatatgcattgagaacgaatgcctagactcagatccaattagtatttattcctttgccaagagcatcatgtgatccttgtcaaggaagtactccttacagtttcctctttttacagtagaaacactaatggtaactgtctagagtcaagagcttattagggttacaaaacggtggtgttttatcttctgtttttatagagagaaagttggcctcatttggttaccaggacatagaagacagcaccgcctcttaccgactgggtccgatgcatcagtgccttggcatcctgtgcactgacttacatgtttatgacttctcgtatttacatgctgactaacagtcaagtgtgtctgtattttagtcattcaatttattttaaagcataacttatgctccgaatgtcttattttagcctctgggaacctcttcatgttgacttagcatgcttttgatgctcaggaaaggccatgcatagttttcctctttcctagtattgttgggtcttcagctctcatccacccatacctttctgcccatattccgacgttcgccaaagagccttgattctcttagctgctaaaagaacataaccatagcactatggcatccattattgcaagactgggtttttctttcttggcctttagagtgggcagagataaccaatatatgctgtgtgtcttgtctgtaaataagattatcatggtgttcaaatgcagtcttttcattctaacccaggcctaccagacttttattttaacatacatgtcttacagtatcttaccgtcttgtcttctgtctggcaggctgccatttaaaatccccatttcctctaccttataatacacggtaaccttcaagtaatggtgaatcagctatgtgatcattgccagcctgttaggggaactgtgcatggaagatgtttaaaggtcaggtatgggtgctaaatgcataaggctgcattcacttggtgtgtgctgggatgtgtttccccctcccccccaaattgcaatatttccctctcaagtaactaggggtgggtgttaccctgggcacacatagacacacacacacaatggactaggggtgggtgttaccctgggcacacatagacacacacacaatggactaggggcgggtgttatcctgggcacacacagacacacacacaatggactaggggtgggtgttaccctgggcacacatagacacacacacaatggacttgggaaccagacttccatttaaatccacttttgtttcagtctgtccactcttactgtcagaattcatcagcaatatcattttcatcttagatatgtttggtggagataaagctcaagacctttgacatgacaggtaaacactgtaccactgagacaacatccccaattcatcacattctcacggagagatcatgtcactgtcgattcatgggcctaaaatgttgatgtcactgttacttaagatttttttttatatagagatattattaggttcagtttcttgaaggaaaatacttcttagtttcttttcttcagtcatcaaagttctgtttgaaaaatacagccttgggctggtgagatggctcagtggatcaaccaaggtgtttacctccaattcaaagaccagagtttgatctctgggacccagtatgtggacggagagaactgattctcgacagctgttccctaacctccccacgctctctgtggtgcatgcgtgggtatgagctgccactgtcacttccccaccacaaatgaataaatgttagctaagtatattttcattttcccagaggcttcctctttcttgtgagactccttactgaggaaatgtgctgttgggtaagcattgctcaaaggcttgagtttcttggaacaatgctagactaacccttaagtatattgagagactttttcaaacctaagagaattaatttgttcttgtattatttactgcctaaaactccttggcttgtctgtcagtgtgcccctgtgggggagcctgagagccttgagtggactctcagttcttccgtatgaaggagccagctttctctagaatcctctgatcgttggacaatggccacttttatagttgttcttaccgaatccaattctggtaaacaagaattatgaattctgcagacctcccttgcctcccagaaacctttggagtaaaaggtttttatattcaaaacattccgaccaaaatgtctctttgcttcctttttgaatgattggtatgcatacataacagtagcatgctggcagccagcatttaccctaatacatcttaagatgaaatccccctggaggtgctcctgcgccgacggtggcacatggtgcctctctcccgaatgatgagagtatgcgcgtggcgtgcatagacacagggggaatattaagttctcagaaggccacaggcacaccacgagcactatgctctaacctctggcaggtgggcaattgcagcttgcttcccacttcagaaacatgtcggcagatgtaggcacattatttaattaactaataattgagaaagctatagtcactattaaaagagcaaagctaattctgggctgataaaggactcttagctgccctaaataggtcgtaattagctggcagcggtgtagctccaccttcagggatgggtgaaattaatgaaagctggcagtgaatgaaactgcatttcatgctcctgcctcaggtaaagagggtgaggagagagtgagtcgctttttagggccatttaggaagcagaggacatgacagccactgccaggaagtacagagagcatgggacattggtttgtatatatcaagttctctgctgcctttctgccagagaactccatcattggtactcagtctccaggagagagagataagccagagatgtgccagccctcattgacatccagtggtgacagtcccctttgtctagccagggtcttaaaggtagcatgagtctcactctttctactgggtcatttttgaaagtttcttctattcactctagggattaaattgactcacacctcttgggttttcaaactctaggttgaggtgtattacatctcctctgagtatccgaggtccctgtgagctccccctaccactgtaccaaggcaaacagcttcaaagaccacagtgtaggaagaagagtcaaaaacaagtcatacaagctaccttagttagccaaagccaaagaagtgttattgttgtatgctgactccagagacagagctgtctagctgatcctaactttcagtaaatagctcctaacctcagaaaaacctggaccaagagaaacacgaaaagtggagcaagccttggagggaacagacagtattaaaaacagtgtttcctctttttgttcttttgaagactgtcattgaaaatacaccgaagcaccttttcctctgtaagtggaattaatggcccttctccagctgatttatttggcaggaacacagagttcatacaacagttgtgggcagacctgttggactcccaagtcacaaaagtattataaggcacctaggactgtggctttgtgctaacaagcatccaggcacagggaacttccatcttcccattattaagtggccggtataggtacctctgtaacgtgcagatactggagattaaaaatcctaggagaaagccaggcatggtggtgcacgcactcgggaggcagaagcaggtggatttctgagttcgaggccagcctggtctgcaaagtgagttctaggacagccaggactacacagagaaaccctgtctcgaaaaaaaaaaaaaatcctagaagaagacagcatctcttagtaacagcaacatagaatgtactgacttctgtgaatttaaaactctcctctcctctctctctctctctctctctctcacacacacacacacacacacacttgtacacacacatgatgggagagaaggaggagagaaagagagagacagacagagttaagtagagagattatgctatgtagaaatttccagcagacagttgcactgaatatccctctccacatagcggcttctgagcactgcgcaggcgttgcctgtttgacaggacactgtgcaagccgcaggctgagtctagaactgggctttccaggccttctctaaggggtgcttgtttgttttaggttttgtctcacattcaactctctacttctgttatttggatttcttctggccatatatttatttacttacttagactgtctttctctcatcaagactaggtcaccactaagggagttaagatttgtgagccaaaaacagtctctttctctgtgttcttttaaaaatagacttgaggaccgaagagatggctcagtagttaggaccacgtgctgctcttgcagagacccaagttcagatcccagcactcatgtcagacagccctcaaccctataatgcctgtgtcatggggatctgatatctctggttgccacagtcacctgactcccatgcatgtggccccacacatgcacacataatttaaagtaaaataaatctttaaaaaatgaacaaaatatgtttcttttttgtttgtttgtttgtttgttttcacttaatcttgttaggttcatccgcacttctagagtttaactgcttaaaccatcacttcagagcgccctgcagaatgcacagagtgctggcgcctgcagattgcctctgtggggtgcttccttctggaaacatttcttcatagctatagaaaagactccattgaattagagttcttagtgtagctcttttccttaatacagagtagattgtctgaatccgcagagtccgctccagacttcggtgtacatctggttgattgctgattcgggcgatctggagccagggtgtagagtttgcattttcaatgagagcccaagccagcttaatgtcgctcatctgaggaggccaccttaaaatgtgctatcttgattgtcttgaaagaaggacagaaagtatctcattcaaagatcaagaatagctgtttctcaattaaccatggtaatctttagtcagatcccgattctgtggtcttaagccagggcacgtatgtgatgcactgtgtcctttgtccatctttgtgggacagtgtcgtgaagactggtacccatctcaatagtaaaagaaagtgtactgtttaccatacgccatccctttttcagataagggaccctcaggtgtcagggctccttgggttctcctcagtgatggcccacttcacctcctccattatttccactgctgtggctatagtgcagtattgcctgcatcccacacaggtcactattcacccatcccacctcccccacaggtgacgactcacctgcctcgcctttgtgcttgtgcagagacgcttcttatgtgactggccctttcatcacgagtcacatggacacaggccatgcttcatcaccaagtcaagtgccacttccttcatgaagccttttgcaacgtgcccagctagagcgtgtttgctctgaaagcccatagcattataagcttgaggttttttttatagaaaccatcactttttatcatgcaccattgctgcttaagtctaagcacatcagatgctccacaaacacctcaaaagggtacgagctcttatccatttgtttctccaagcaccatagactgcttgacttaatagtcatccagtaaatatttaatggatggatataaatgaatacaaatcctacccaatacgtttgtgagttcaaaaaccctttttgtgagctggagatacagcttagcggtagagagcttgcctggtgtgttccaggccccaggttcaatgcccattactgaaaaaaacaacctagaaatccctttgttgtttatgaaataccagtgaatttccgagcagttttatgtcatataggtggctcacagcaaagttgaatggataaattgtagggctgaattctgatagaaaagtctccacagttctattcagagagaccacctgtgctgtcttagccaaaggttggcaaatctgttaccttttctagggttttcatggctgggtgctgggtttgtaataagtcactgacagatccattcttcaaaggcagtcttctattttagtttctcaacagtggtaaagcaggttccaaaatctcactcaaaattctcttagctgccagttgcttcatgaacagacccacccagagaacctgaacccaccaacactcttgatcctcaggaggcaaatgtcacagttacccagagcagaaacaaaaacaaaagacccaagcacaggacgaaagcttctagcaaaagcatctgggtttcattcttcaggtatgcctcttgagttgtcctaaaacacacacacacacacacacacacacacacacacacacacacacagacacacacatatctgtacacactctctctcacacacactcacacgtacataacattttcttctttgataggaaatctataaattattacactgggaacactaaataatttcatgatgagcctagagaaaagaaaaaatggcagctatatcttctagtcctctgcataaatggttgatgggtttgtgtcctacacttgaagggaaattattgaaaacatttcttttatacaattcagctcatgcccctctttggtcaaactctgtgatagccctcttccatattttaaaaattgaattcatatcttcata

SEQ ID NO: 827 - DNA, 647 bp, Mus musculus
atgtctgagttgaggttttcaactgaacaggagcatgcaaagaggaagcccgtgcttgtggtgagcttcatagccctgtgcatcttgctgctagccatgcgccttgtcaatgatgcgactttccctttgctcctgaactgctttggacagcctaagaccaaatggatccctttgccctacacattcaggcagcctcttcgaactcactatggatacataaatgtgaggacccaagagcctttgcaactgaactgtaaccactgtgccatcgtgtcaaattcaggtcaaatggtcgggcagaaggtgggggaagagatagaccatgcatcctgcatctggagaatgaacaacgccccaaccaagggctttgaggaagatgtcggctacatgacaatggtccgagttgtgtcacataccagtgtccctctcttgctgaaaaatcctgactattttttcaaagaagcaagcaggaccatttatgttatctggggccctttccgcaacatgaggaaggatggtaatggcatcgtgtacaacatgttaaagaagacagttgatgcctatccagatgcgcagatctacgtgaccacagagcagcagatgactcactgcgatagagtgtttaaggatgagactggaaaggacag

SEQ ID NO: 828 - protein, 216 aa, Mus musculus
  VARIANT (1)...(216): Xaa = Any Amino Acid
MSELRFSTEQEHAKRKPVLVVSFIALCILLLAMRLVNDATFPLLLNCFGQPKTKWIPLPYTFRQPLRTHYGYINVRTQEPLQLNCNHCAIVSNSGQMVGQKVGEEIDHASCIWRMNNAPTKGFEEDVGYMTMVRVVSHTSVPLLLKNPDYFFKEASRTIYVIWGPFRNMRKDGNGIVYNMLKKTVDAYPDAQIYVTTEQQMTHCDRVFKDETGKDX

SEQ ID NO: 829 - DNA, 123331 bp, Homo sapiens
  misc_feature (1)...(123331): n = A,T,C or G
ggaatcagagaaaaagaaaattaagatgtctgaggtcattcagctattaagtagagctaagattttaattcttggggcttcaaagtaactttagtggcagcaactcagaggaacagtataggtaaggaagagtggatcagagaggcagagatcattagtttggatttggactattgaacttgagttgcttctgggacatccagattgggatggctaatactgttggaaatctggcacagagtgatctggtgatggtttaaaaaaaaaatcaaaggctctttgataacagaccttgtgcattttacatctaggttcctgcctaatagtggagatgtttctgcctttgctattctagcaggggaaactatacgtaataaatgcatatgctttatattgttttagtgattcaaatgactgtcaatgcaatattaaattcagaattgataggaaaactgtcctacttagaaattcaagagttcttggcacaatactatttattatcaccatgagacctgtgctgtagcaaaactctgcttgtgtttcggtgaaagactgtttaacatgcatgtttcactctaccgaggttcaactttgacctataagaggacagtgtatattccttagagagatgctaggaggtaccacaattgatatctatgtatgagaagtgggtgggatatgcctgcatgagcaacataatctaaaccaagttcaaaaaaagaagttttttttttttccacaggtgcaatcttgacaagaagaaaaaactcaaaaaggtattttgcattggtaaattctgatgtcttgggcagctccaggactgtttgtcatgctttccttatggacttctggttatgcctccttaaggatgtgggctgagggataatcatttaaaatagtccaggcaccatttctgattctttgttccctagaatgatgatggtggtggtggtggtgaccacaacggtgacaacaatgataccaccatatttcattgatttttaaaatgtttttccacattttcagctatctaagaatacttatactcagtacttccttgcagtcactgtcagcctgcaacaaagttaaatttgtccacagaggattggcattatttcacatggtcacctggggtcactaccaacctgagaccatttaaagttatttgctgaggtgttttgtttgtttgttttcgcactgtcagtatgaacttgtatcagaaacctgcatgagtatctgcttgtggttcaagttctcagggaagattatttttcctctttctcttcttgctgtgcctttctgaatggaagctttctttctggcatattctagtgctaagggaatagctgtttggtgtttcagctttttgcagaggtctcttattagactcccatcttacttttctttcttattctatttagagtaacagtgtgactaacaatcgatggtctcttatagctgatgaactactgtaacaataaaagctaacatttacttagcactttccttttaccaggcagtgctctaagggctttttatatgcgataactcatttaaaccttcaataattatattagatgggtactcttattttccccaattttaggtaagaaaacgtatgctgtgtgcccagggttgcacatattgactcacttagtgttaccagtggagggtgtccaggttctgggcgttttgaacaaagaattgcacaaaacacacaaacaaagcaaggaaagaatgaagcaacaaaagcagagacttattgaaaacgaaagtacactccacagggtgggagtggccagagcataaggggctcaagggcctggatgcagaatcttctcaggtccaaataccccctagaggtttcccattagcctgatgtaaatgaagtggtgttcacctcatgtaaatgaagtggtggtctgcaaccagtccgattggttgcagaaagcaaccaatcagaggctgagttacaaaggtcacagtcctatgcaagttttctgcaaccaatcagaggctaaagtgatgttacaaagttacatttctatgcaaacgaagacttggcccacaatcagtctgattggttgcagacagcagttaatcagaggctgaagtgaagtttcataggtcacactcccatgcaagcatctgattggttgcaaaaagcaaccaatcagagatactttccattttcaatctgccacctagaaaaagtggggttttgcaaagggagtggtctctggtccttttgttacctagccagtggaaagttagggtttttctttcaatttagtcctaggaagtcagcgtgaaacggccttaggttccctgcctccagaccctattctcttgcctcattagtgtaacttgaccacctgagtctaccggtacacccctggtgagaatccacttttagctttgtaaagtacttggcataatgcctgatacttgctgagtacatagtgagctgttgcaagtcccttccactaaaaaataagctattgtccttatcagaagaataggatactcttttgttatctatttctcattccatgatataggattctagctttaagtgttgtcaatctcagacaagagttgattatctaaaaaatatggattcttgtaagccttttcattatgtgccatataaaaaatgttgctccaagcaggtttactagtttatcaccattcagatttacaagttctatcaggaacttcaaagcaatttcctagtaaatttcctagtaaaaagtccagtttaacaaatgtttaaatttttctcacttctctttatattttaaatttttctcacttctctttatatttcacaccctaaccctctccctcactttcccattccccaccacattcacctcaaatctacacagaaatcttaaagtgagatgaattaagaaaaaaaaagaaaattgccttttttcttttatgaaaaaacatatttttataataatctgaatctgaaatttttgaaataatttaggacttatatttagaaaaaatcatttaatccctctgtccttccttctttctctccttcattctttcatttcttccacaaatatttactgaatattttctgttaaagacattgtgcttgatactgccttatgagatatatttctcagattttgttcatgtcctgaagaaattttcaaagacaaaattaagggggaatctttctctccttccctcccttcctttctccctccactctccctcttccctctttcctccatcttctttctccatccaccccatcccaccccacccttatccatgaactagaagccaaggaggaacaaatgctttatgggggaaacactctgagcaagttatattggaacttgcagagatgaggatggtagaatacagcaagggggccaggaggagcagcatgaacaaggtcacagtaactggatagcaaaggggctttagagaaggctgagaagtccagcttgaaacatggaggacaggaaagggagagatgggagaggagacttcccttctcacttcacttgttacagagagatgcatgtgaggtgtgaggataaatgccatttaatgtaaggtcatgtagattcacagaaaaataagagattccagctgatgtcattatcatcgtagtcattttcatcattgtcgggatgcctctggcaggacttcctccctaatgacaccaggaccaccagaatttacacttatgctctgcttctgtgtcctgaacaccttggaggtacgaatggattctaagagacaaactcatctcgtttagagtgaaaagatgacaagcagaggttcgcagaagccacatacaaccaatgaagcctataaggtagctgagaattaaacaaaagcacctgttccgattaccttcattgttcctggttagttagcacctccctttcctcaacagaatgcccggcgcacaggggtgggatctgagtgagggcaacaggtggattggagaacatttcttcccataagtagtaggatttgatggaaaaacaagtaacttcagggtaataaaatgatggaaagtcctgatgggtcaggtccatatctaatcttaagaagggcagccttaggcagcatagtgggtgctagaatcattggtaccatcaagaaaagagtagtaatgtgaatttcaaagaagatcactttgggataatgaacagcatgacagaatccgggagcctaatgaagaagatgtgatatagtaaaagaaatatactgagtgtaggctttgaatagggcagaaggagtggaactagagaggcaagaggagatgtgattacggaaggtcttgtatatcataccaagggtctgcacttacactgtagagtccagagggatctaaatgtaggatagacaggatcaggtttgattttggaaagctcagtctggaggtggtgtggccaatgtttgggaagtggtaaagactctttcgggaaagacaatatcaagagcaaacatggactacttcatcaggtatcaccagcagatattaaattatcagtacaaaacccagcaattattactttcagatcggccttttttctcttactaggagaatatagtccagatagagtgtacgtgcatgaataatcatcatagtcttaacagaggatgaagtttaatgagtgttatcagttagataattatttatataatctcagttttccagacaaagaaatagaggcatagtgagatgaagtgactgcccaaagtcatagatggagaaaatggtaaagatgacttgaactctgatattctgcctctagagcctgtgttctagtgtgtgaattaactaagttgttaattgttattcatactaatgggaacattctcatataactggttcagaaattttaaaaactggtaccagccttaggtagattttgtaatgcagtttgtcagtaaccaaaatacctaattcatatggaaaattaagaggctggtgtgaagcatgataattacatttactttgaaatcagcaatttgtggataaatttaattcattttgcccaactctggctttattcccggtattaaaaagacaactacagggtgcacttggttagcactcagggaaaataaagcaattatttttccacttctgctagagaacactaggtaccctttgtcagtcaattgtatagactcttattgtaggcagtttgtaggaaccaacctgatggaatgggtatgtcttcctctttcagctccacaatccaatgacccttttgttcaacaaagacacaactaaacaacaaaatgttggtagttaaaaaaaagtttaaaagtaataggacgccttcaacatggtaatctactttaagaatttagagcacatgtcagtatgtcaccttcagacatggttatagtccagtaagaattacaaatccaacaaacaaaaatcaaggcaatagagttttcatgggtaccactgtaataaattcttctgtgcaaaaagccagtcctagagaaaaattataggtagcaacatttcctgaggaacttttttcccaaaggagttttttttttggggggggggtgtgcagacattattgagaagttcaagttaacatgagcattatgactgtatcagatgacatgataagaggttacattgaactttctaacacctattcttaaattataataaaaaaactcattgagtttttaacatgcctgtacattttctcattttattcagggagtagatttaggtttttctggcctgactggatttttaaactgctacaagataacataaaaataatcatggctatattcactgagtttgtttcattttgtaaaattatgaaaaacaagtttatctcattcagtctctttagcatattgattcagtatatctccctttatagaaaagaaagaaagcaaggattttcacaagatagagctgaagactgatattgagtacatagaatgaagagcccagaaagcaacgtctctcagtgtggctggacagatagacacaaataaatttcatccaaagggttagttctgattatgagaacatgggagccttgggccttctttacttacccatacccctaacaaattagtggggtttttcctagagttcactatagtttaataagcgggatacacccagatttttgattcaacgatgaaataaaatgaatgaagcttttatttatatactctgtgctttgctacttcaactttgtgcaaatggaaagaagctttattgcattcagagagaattagatttggaacttggtcagtggcacaagatagaactataacatattgatgagacaactttttatgtgggaaaataattagcgtttgataaaatcacaaagaagcaatgggtagggactcatcaatgtgtgaagtgactgagcactgatacacataacacagttgacattgtctttaatatttattattgaataaatgacagcatgtgaacaaaagtgtatgcttttcacactagtgaatacttggtcattaaacaatagttaaataaaaaacacaactttataccattggttataatttaggaaaaagaaaacaaaaacatctgacaatagactggattaaaagttaaagattttattttgtggttaaagactacttctacagtagaaagaataaaaacatatacatattaatatagattgcaaatttgctaggtccggatctttgcacttgtgttctctcccaaaataatggattttctgtggattttattttggaataggtatttctcctatgaagtctgataaatgatattcccactctaaagagcaagcagctagaatgccatgtttttgatgcatatttttgcagcacagaggggattaaattctaaatgtctcagctgttaaaggccccttcagacttgcccaaaatgaagaacaaagaaggagaaagctttccctaaagcaattcatcagatctatttgggcacagtgacattttctcagaacttatatggataagttacactgaacagttcaagggtttgcagctgcttggaatatttaagaaaaaaatatctctagttcttatgcatttcatatggtctgaccagtgctcaacactagctaatgttcactgaggctgtaaccatcagtagttatgtcgtaatagcttttgtttctcgagagctcattatgtgcctggtactgtgttctgcattttccactcattgtatcacttaatatttatgcttctgatcttaggggaatgactgtttatattgcatatatgccatttttttgcagtatgaaaaatttgttgagccgagtgtcatacattataaactgacatgtacttactgttgtttaatctaattggtggttgttaaatctaaaggatgttctaactacttcaataaaggcagcagcaatcacttccataaataaatcattagacgtagaacacatgtgtaaacaggtagagtcttctaatttgctaagtgttgatggactcaaaacagttactagaacaagccatagatggaatacatttattgatggaataagtcaaacaacttgaaacaaggcattgtggtgtcttaaatggtaattcaaataaaatgaagtgattgatacatttttacttgtttggaaagtggagaatatttcggaattgcaaaacattgcacttttatatacatttatcctttcattatcctaatgtagggtagataggacagttgattgcatccaacttcatttatttggcttattatcttttgttttatgattttaactctgtctagaatcatctcctaccacttagagtctatgtattcttctgaccaaatgacttcaagttttctgaccaaattaatggcctttcaaactgttaatccctctgcctggaatgcccttcacatcttctcttggcgaggccgccgcggtcctcaggactctgttggaatatcaccaccccagacaaacattccctgaactgttcctcctatacttacccttcctctggcctcccacagcaccctgtgtatacccacattagcatcatttgacacctggtattatagtgttctatttactggccagctgcaccaagttgtgactctttggaagcatggtgtgtcttttatggttttatttcggttttttcagcacctagccaagtctacacagagtatggactcaatgagcgattgtggcttgaagatgtaaattctttagtatgtattgcatgatatacatgtgagacatgcatgtatatcatgcatattagtactttgttcacttccccacctcccacatccctatgacacacacacattctcattgcattcagcgatgtgtagccttctgtctcatccatggttttcattgtagttgctgaagcttgaggtcacgatctggtggaagtgactactagaagaaggcacatgtgcattgtattctgttgtacttgtcatctggagcacacagtgtacttgaaggtatgccttttctagtggaatttcagagtggtttcatactagcagtatgagaacactttcatgctaaacaagaagggcaaagaatcaaacccgggcaatgtaacagaaactgagctgggggcctgagctgcagaaggaacctctgtccactgcagaataccactcccagtggcacacagaggagagggtgtctggcttctgctctctggttgctcccttcaccctctctgtgctcattacttggttccctttgatagaacatgagaggcagacatgggttgccagggagcaggcttttacaactgctatttcatcctgttttgaaatttctctcaaaatggttgacttatttttctctcacgtatgcatacgtatgtgttgctgcacacaacagtggattcagaaaggctatccacatctttgtccccaaacccccagccatgcaatgcaatatagcaaccaagagaaccagagagccgtgctgagctctgaataaacaaaagcacaaatcccatctgggtctccttcaaagcaagctgctattttgcaacaagctaccaaatgacgattaagaaaaaggttcttacctgtttacttaatgggtgactggcctctttgcttttatttagccatctgttctggtctatgtccctttaaacttgtaagatccatcacttcattaaactgttaccttgacacattgcnnnnnnnnnnnnnnnnnnnnattaaaacagtttttcatgattagaagcttaaatgaggtaaggctgtggtagttagtggtgagataaggggtgttgaggaggcagagctcaaggggctttcaggcgattggaagattaggctggcgagatggagggctggggcttttccaaattatgggaggtgagcaagaagcaagactgcctttgggtatcgctgactcctgggggctggttccattgcccatacagaggctgtgaccctggccctgggaggatacaggaactgccttcaggtttcttgacttccctaggagagtctgcgaagagcaaaaagaactaattccaccgggtagtggtaagctgaaaatgcaacaacaataaacattttggtctttcacagaaagttatgtggctttccttaagttcgaagaagaatcagggggcccagcccaactatatgaaagaatattttattgtgtctttaccctgcacttcatggcttcagcagtcctccttcttgctctagacttaccttccacctgactccttgacagttgctgaaaactagaaagtcaagggctttatctttttactatcttatgtcagttcctgctctgacaactctggtttcttctgatatgacccataatattgccgtcacatggaccccaaatctgaggaatctctgaattttccgtcagccgcttctgtcctgtcagtagcccaagttctatttctcccacctaaatcaagtttctcacatctttttccaccttgttatttcttcttcttctgccctagttttcatccctcattacctctgtcctaggcaattgggatagcctcctaactagtcactgcctacctatactctctccctgctccaaagcatcttaaacactgatgtttgattataactcataacttccccccaccccgccttttttttcttttttaaaaaattatactttaagttctgggatacatgtgtagaatgtacaggtttgttacataggtatacatgtgccatggtggtttgctacacccgtcaactagtcacctacataaggtatttgtcctaatgctctccctctcctagccccccattccctgacaggacccggtgtgtgatgttcccctccctgtgtccatgtgttctcattgttcaactcccacttatgagtgagaacatgtggggtttggttttccgttcccatgttagtttgctgagagtgatggtttccagcttcatccatgtccctgcaaaggacatgaactcatccttttttatggctgtgtagtattccataatgtgtatgtgccacattttctttatccagtctgtcattgatgggcatttgggttggttccaagtctttgctattgtgaatggtgctgcaataaacatatgtgtgcatgtgtgtttatggcagaatgatttataatcctttggttatatacccagtaacgggattgctaggtcaaatggtatttctggttctagattcctgaggaatcaccacactgtcttccacaatggttgaactaatttacactcccaccaacagcgtaaaagcgttcctatttctgcatgtcctctccagcatctgttgtttcctgactttttaatgattaccattctaactggtgtgagatggtatctcactgtggttttgatttgcacttctctaatgaatagtgatgatgacctttttttcatatgtttgttggcttcagccaaaacagataaatagacaaatggaacagaacagaggcctcagaaataatgccacacatctacaaccatctgacctttgacaaacctgacaaaaacaaacaatggggaaaggattccctaattaacaaatggtgttgggaaaattggctacccatatgcagaaaactgaaactggaccccttccttataccttatacaaaaattaagatggattaaagacttaaacataagacctaaaaccataaaaaccctagaagaaaacctaggcagtatcattcaggacataggcatgggcaaagacttaatgactaaaacaccaaaagcaatggcaacaaaagccaaaatagacaaatgggatataattaaactaaagagcttctgcacagcaaaagaaactaccatcagagtgaataggcaacctacagaatggtagaaaatttttgcaatctatccgtttgacaaagggctaatatccagaatctatgaagaacttaaacaaatttacaaaaaaaaaataaaaataaaaaaataaacagccccatcaaaaagtaggcaaaggatatgaacagacatttctcagaagaagacatttatgtggccaactgtcccctttaacaaaacaaaatttcttttggctttccatcacctagcaaacttagtatagatgtattagcttgatatctgaggcaattcagaataaagttatcatttgtgtttctagctttttctccttcttcgtgctccagtaagacaaactactgtacgcctatgagtaactgtatgtattcttgtctgcgtgctgtttcctctctctggaaagctctgttcacacatatctgtcaattaaaacacatgcattttatcaagctcaatttcaaagacatctttgctttctctcttctcaatcggatgcagttgttcctgtttttcttccatggcagtatgtttagaggaatgttctgctgcttggcataatttttttttcctcttgttacttttttgaatcttacttttgcaaatcctatagcacaggcagagtttcctactcatacagggtgctagatacagaaacagaagaatgagtgataatgatactgtgtctacaagaatgtgaacatccattcattcatttatttattcattcatttgtttcactcaaatgttctttgaatgcctgtagtatgtaaggtaccatgttaagagcctgggatacagagatcaagatgacacagtacattccagttctctaagaactcacaaatccatgtaggaaaatcacataaataattacacagtgaaaaagtacaacaatagaagtgtctttaaattatgggaatgatgggactttacctctgttagagtggataggttgggggtcaaagcatggtggtgaggaggggattgagcaattagaaaaggtttcctgtcattggaaatgtctgattggggttttgcaaactgaataggagtgtacaaggaatatagtgagataaggaagggtggagatgcaatggaagagttcaagaaagcagctctgcttgctctcagcagcccagcacactaggacaatttggtcaccaaataattattttccatttccaggtaaaatatgctgaatgacagaatccttcgacccctatgaaagaaaaagagaagaataaaggaacctccttctgtgactgcctttggttgaaagtcattcgttcttctttttgtttttttaatgttttgtagagaaagtctgtgattgctgtgagcttcatagcagcgttccttttcctgctggttgtgcgtcttgtaaatgaagtgaatttcccattgctactaaactgctttggacaacctggtacaaagtggataccattctcctacacatacaggcggccccttcgaactcactatggatacataaatgtgaagacacaagaggtaagatcccagagggttacctagcagttggagagtatccatggtaacagcttttctttaggagccagagggcttccaactcactgaacttactctgtctgccccggagagcttgcttgggtccctgacaacatcttctgtcttattattcttagacatttactgacaaatgtctaaatctgccacccctcctacattaaatcttctgattcactggcttcatatggagtcaaggaagcaattacttgttttcctggtggtttgtggcacaacgtacatatctctccatttagaagctctgatcagcagttaccagctggagaactagctggcttgatttcctgtaggtcaactggttggggagagctctttatagaacttcaaaaatgcatttatactccttaaaactctgtaatccttagacctggagctagaaaaggccaagctgattttaaaatttgcagtggctgcagagataatgggatttaaagagttttcaaatttaaaggggttaaaatcgtgtaaatcctataatcacagaagctttaaatctttgtagccaattggtagtacaggagaggatggaggtatattgacaactagaaagtgcacactatgctagcgcttttgcaagcaagcatttgtctcataaagtaaaataaaaataatgaacctcacaaaatatgtgatgtatatagaagtgcttaataaaattgttttcactattcatttctatggagttggatgaatgtgagtttaatattcagagacacaaagtccaagcctgtttgaaattgttggtaacaaaggtacaagctaccagtgtgtctacattactagggagagtcttggatcagctcccatcgaaaggtcattttgtaaagatactagagggtagagtcatgcatggaatgctactcctgtcctgagagttattcttagcattctgggaggatgctaagcttggtctacccccttttgtagtcaatctcatatctgagtcattgcttctggttaatttgattcttcgaaaattgtttctgtatctgcaggatttacaggcctttattagaattttatagttgaaaaaaagcaccattaataacacataaattcttagaatctttgatgtttatcctctaattggttttaaattaatttttttacagtgtctattgcttgaatttgttgagtgtcctaataaattgattacctatataaaaatgtatctctttgaggagagtttgtctcaccctcatcttttgttacttttatttctggctatcatttaatattctataactctactgtatggtgttaatcaattcacaagtgcctgtcacaggctgaaaatgaaacatgtgactaaaatgtctcacgaagtattctcatatgggaaatcccgtcaaatatcaaagaccctttcatttctttaaatattaatgaatttgatttcggagtgtgaaaggaaaaactgacctatggatgcagttatttaattagttctattaactgggctatctttgaaattattttgatgtagtttttaatacaatgattttacaaaagaatattgaatattattttgctcctgcaaaggttatttcttaggagaaaacatagttactggaaagaatctgggctttggaagcacacaggcatggtttgagagtcagttctaacatttaatgaacttaagcagtatatttgcttttgggtaacttccttaacctcagagccccaatttccttatttgcaaaataaggataacaacatcagcctagcaaaattattttgaggataaaataagtcgaagtatatgaggttcccagctccaaattgctattcaatgaatgaattgcttttgctttctctgtactttccagtatggcataaagtgttcagtatgaataacatcaaattatcacagtccagagtaccagaatttatatgtacattttaaagatcctggacttgggggaataaacacatgtaggggttctcaatctcattagtaatcatggttttacaaattaaaaccacaatgagaaaaatatttaaaaatcacaaagagatactaatatacatgaaacgccagattggcaaaaaattaagaagtctgacaataccaagtgttgacgaggatgtggaacaacagatactattgtatacttgtagtgggagtaaaaattgtaatacccactttggaaaaaacagctccactgttgtattgagcaaagttgaagatttacatgctgtatgcccaaccatttctagtcatggatatctacactagaggtgctcatgaacccgtgcactggaaggcatggacagaacatgtagcagcatttttcctagtagccggaacctagaatatacctaaatattgatgagtaggagaatgaattagagtcgtgccacatacatttggaataccatacagcaatggcgatgaagaaactgcaagtatatgtgaccacatggaagataaagcaaagtacacaatgtgattccgtttatgggtcacaagaagagactaaactaaataatgttgcttagggacatatacaacggtaaactaaaaaaggaaaaaaaaagcaaggaaattattattatgaaagggggtctagcggttacctctgagaggagtgggcagcttgtgatcagaatgggtttctggggatttagcaatatactatctgttgatcctgttggaggttacacagatgttcacagtccatttattaagtataaatttatggtttttggacttgtatgtctattttattaaaaaattcaaaatatattctgatcccaggaaggatgtttatttaccatttaccatggggaaggaatcatacaaaacaattcacctaattcagcagcaggaaataactaaaaagaagcaatgggatattaagctatctaaagcaaactaggaatatttgaaataggcaatttgattttctataaagactaacagacacataagcaacttatttctctagttctggtctatgcatgatagaccccatattgcatcatgaatgcaggtgatagagcagaaaattttgcatgaaagttgaaaacattagaacactcaaagggaatgacagattttctcctaaattcaagtagttctaggctaactcgggagaaaataaaaactttgtgactttttaccacccttctcaatgatttcatcctttgttctgacagtcccacccctaccaccatgtctgtgccatgctcttactcccaaatgattgtgcatttgttctcactgtaatgtcctcaggcgcaatccgttgcagaaatggttacattaaataagagacacagtatgataaagctttcaagagccaaagtaatatagctgaaatgataggtggtgagttcagtgttctaggacaaatagcttaaatagtgaccacaaaaccatgcttcagagattatcacacactaagtccctattcattctattctaattctgagaaggtcaataggcttagctgaactgagtcaggtgatcaccaagctgatctacttatttcaagatcttggcccttaaagttttctcagaagactttccccttaaatgcatatggtttctggaaattactaaacttcttagtatttttttaaatatgcaggcatgccagcagtgatttccagacctagagcatctgcaaacaccatggctgttgatgatgggtttactgcctgatgcttcagcttggccagaagttgctgtaactagtcatagattttatgagctgaaatgattacaagaaagaatgtctctttactactgtctaaagaaaagtggaatgggaggcagcagaattaggtcaaacatctagtggacactgtggagtgtagggttgcttaggagcaaaatctgattctttagttatcttttaaaaatagatgactctggtccctttggattggcacaagtgaaaatatagctggtttgtgaatctatgacagcctgccctgaaggccccacatatagtaaattatacccagtttaagctctgcttcattttatcaattaatctgtttttttttaaaaaaataatctgttcccaggggaaatacaaaaattaaaataaaaggaacacaggagagatgtggttttgcttatatttcaagctgtttatttttttccctgatgtagatccataaaaaagagcatgtgaaaactgtgatgactattataaaggggttaaatagaaagatcaaaatattcctcccactgtaataatgatgatctaaatataacagagttggtgattggctttaactctttacctttacccagtctccccttcactttctcaatgagtgtaagctaaggttcttttctatgggggaggggaagtcttgagaagcagggaagaaaaatgagtgccaactaactgggtgagtgctgaaattctgaaagtcttcgctggccacggagccccaaatttctcatcaacacgtgtttaagctgatagcaaccatgatttcaaaccaaagcttggatcaggagtgatttagattttgcaacagaccctgccctcgcctccctgctgtgtcattaccgtgtctataatgcaatcccccattttaaaaatgacaatgtggagattccacctatagcattatggcagaattactgtattatcaactggctttggatatggtaaaaagtatatgtcacccatgtatttttccagaaaaaaattaaaaacagaaacgtgcttcacaatatcctaaaaccctattttccccttgaaacaaatgctatttattttaaattattaattatagcagacagaggaggtataaaggactaaggtagtccagggcttggttcaaggtaatcttgctttctcctgttgagatcatggcagatttttgggaaaaaggagaaaacgaacttcaagctaggttctatttgtagttgcctatgagggactcagtcattgtgttgtcttttttgttgtgtgacctggtgtgaagacattgctcagagcaagcagcctgcagtttatttgcatttactgctagatgaaaggatccagcttgggtgatcaataggatgccaaggccagatcttattggtaatcagtgagggtgacagatgtcttccttagacctgataggatcttccccttaagatgctggggctacagaggatttctggtatttggggaagagtgccctttccctgggtgcctgaaatgtgccaagtggagaggtgcaagattgccagaacacaggaagcaagtgcagggctgcatactgacttactcgacaatttaatgaggctgaagtatgcctctttaaaaaatgagaacgttttaaaacctcaagtagactaaataggaatatttaggatcagttgctgtgacagacaggccacactagcctaattaaagatgtgcataacatattgatgttgcaatagaatttcccaaattatggttatagtaacaattaaggaagagagctgactttcttggtgataaaagcacacactccacacatttaaataaatgtacacatgtaactaaagctgacatgaataggttttctatatttggtaatagaggctttgggttttacgtaagtatattgagagcaattatgtgcaaatgtatgtcccaaaagtttaaaactgatccatttaattgttaattaaaatccgaacattctcatttatgtaatcataaagcaaaatgaaatttgagtattaaatgttatagaaaaggaaacagctaaattaacatataataaatcaaaactttgtgactttttaccaccctcctcattgatttcatcctttgttctgacagccccacccctaccagcatgtctgtaccatgctcttactcccaaatgaatttgacatgtgtgtattggatttgtcattttaaggataatttatcatttttctcaagtatgaaaggatatattttttgagtggagaagagatgactatgtttctcagtctggttgtgaaatagcaactttcaatcaatgaccatatctccagacaatctatgagtgccagatgagaaggacagatgccactgtgggttagaatatttccaggaagcttttgtgggagaggtgagacatgtgctttggagaaagatttggatgggacagaggaagaagacaaagcagagttgggtaaaaaagcaaaggttcagaatatgtattgtgcattttccttcagcccctatgactcccagtaggccaaggacactatatggaaagctacagtaaagccctaatgtctgtgctggtaatcgtcattgcctcacacttggtggatccatttcatacctttctctggattcaatacctttagtcctaatcgtgtggctcttctttttgtttagctggttatctagtcttgtagtgctcttaccttggccctactgccctgcatactatgtagggggtcacttctaataatgcttctctctgtgtacccctgacatggacacaactccccatttccaaggggcccctgaagtactgcccaggcctctgcaatcctctgacttccagagaaggaagtcaggcacatgtacaggtaatacataggtcaacctggctggaacttactctggaatatagaagaagatagaaaatgcattcattgggtaattatgatctgggaatgtgagtgggattatggaaagaccacactcctatttagacataggagtaatacatacatgtaatatatatatacattcatagttatgaatcagtatatacaagtatatggaaaatacatacatgtatgcatgcatgcagcatatacatgcatacatgttcacagatcaagttctagccacttaaatacaaacatacatagaatatatacaacatactatgttatacattaaaatggtatgtaaaatggtgtgtaaatggtgtaaaatggtatatatacacacacacacacacacacacattatatatatatatatatagtcaggtaggtgtatagtgtgccttttgcggttgtctactctccaccttccctttattagagaaggtggcccttccttttgaccacaagggtgagcagaaaagtcaggctagtgattggtcaatcaagtgattggttgaggggtgggctcatggcccaagatgagccattctgaagccttctcaaattttattatgtttttctgggacacactggcaggaaaggcccccttttctctggtggtaaagctgttgggatgtgattctctggatgtcagtagctgtgttcccaagacagaatgagacaaagacactgagagaagcagaaacaagttgcaaggctaatgtgaagacccagacaacacttcaggtcctgagctcaattcttgaaggcagcctcccctcccatcccccatggtttgggtgtataagccaatatatttgtcttctttttacttttgctggtttgaactgtttttgtcccttgcaaccaaaaaagtcctagctgatatattgtagttattttacagccaccaccaccaaatgttcagtaactcatctttaaacaaggtgccatctgaaggaggagaggagtagtctttccaaatctgcactctcaaacctgctggggggccaaacacaagtcacatccatcagtcagtgcaggtgtctgcaaggggtgaacgctgtctatctttctgcttaggtgcatattgcttagtaaactagcttatccttttgtggtagaaaaatgaaggtcaatttcccaaggttataatgccagaaaatggctggacaagactgactactacctgaattgctagtcgtactcaactgataaatcatatagtttcattataattgttagatgaaaatttctctattgctgtgaggcatcagcagtcaaactagattgattttcactttacaaatcacattttttattgatgaaaaatccattattatcataggttttaatgtagtgatcggttcctcaggaagatataccgcagttttatttattacagagccttaggtagaaaagtccccatttgccaactatcttgttaacgcacttgaaaggggcctattagaaattcaactatcaaattacctcatttgtgacaagcaaaggaaaacaaaacagtgtatctatcacaaataccttgatttgagggttgaaaaagatgatagaactcatgtcctgatgtagagagtttttctatagctcttctcaagctgatggcctggcagagtgactagtgcgaaaagctttcatcaaatggcaattggtattaaccaaataccaaatattttgaaaagtgcttattctgttccagacattgtgctaaggatcagcaatgaactgtaatttaaagaagtgttaaaattggggttcaccaaagaagagaacaacatggacccaagttaggagtatcctggaacaataccacctagaaggtgtttgcattgcagcctgtaatgatgatggctgagtaaccatcttacacaagaaattcatttcactgttctcaagaatagtgaacattcaagtaatttcaattaaacacttatatttaatgtctaaaaggtaatttgtcactaagtagatggcatcaaattgtgagttcttatttttcagagtagccttacaaaggcttattcacaaaagaaagatagccattacagaatatttcatttcaaaaataactatatgcttttatatcaaatgttatccaccaccgccccccacccccccacaagtttgggaaatagtatgtctggttaaccgagtcatctgactaataggcatttgccaagtatttaataaatggattctttatttattcatttattgacatggagtctcgctctgtcacttaggctggagttcagtggcacgatctcggctcactgcaacctccacctcctcggctcaagcgattctcctgcctcagcctcccgagtagctgggattacaggcacctgccaccatgcccaaaaattttgtattttgtaaaaatacaaaaattacctctagaaataccctgctgtggtgtttcataatatgtgtatttgagtatttgctctgttgtcttcttcaaatatgaacatttacgaatcccaaagtatacctggttcaaatgattttagataagggattgcaggcctgtgtcaaacacagactataaaaatgattaagaatgaataaaatacatgggaagcaaagttctagcaaaaataaaatatctctgaaaaataattgaatataatgactagaaataaataaataaaattgtaatacctcagtggttaggttaaatgacagtcactgtgttaagtattttatgtgccattttcttttagctcttacggagtacatactattttactgatttaactaatttttcaaggcccccaaagtattgattctatgctagtgtctttcattgtcctgtgtggcaaaacaagaacctaagactatcctagtcaacaaattcctttaaatggtttcacagagtgtctgccaattcatgaagtcagtaagttcatggaatcccatttgttgaatttactacatgcaacgcactgtgctaggctctgaaattgtaaaaaagaaaacactttttgcctagggataaataaaattttttcataatgttaaaggctaataaagaaggtagaataacatgtgaaagattattttaactctttaaatgtagtcatagaaagaaagtttggagataatacttcaaaatattaactgtgatggtctatatctgggttgtaaattttagaatttttttaaaaaacatgttttccaaattttctacaatgagcacatattgtatttattactagaattttttttttttgagatggagtctcattctatagcccaagctggagtgcagtggtgtgaccttggctgactacgacctctacctcccaggctcaagtgattctcgtgcctcagcctcccaagtagttgggacaacaggtgtgcaccaccatgcccggcttaatttttgtgttttagtaaagacatggtttcaccatgttgcccaaggtggtctcgaactcctgagcctgatccgcccgccttggcctcccagagtgctgggattacaggtgtgagccaccatgcccggttgaagaagtattttttaagcaatgtatatctgtgaaacactctagaactttcactatcatttaaagaataggatttaaaatgtctagataaatatattgtttggaatactttaaaaagtgaatattctcccattccttaaatgtgggtttctcctagtgactcccttaataggactacaatatggaaaggagaataaatagtaactgtggtggaaaggctgacaaacactatctcagctaagtgatcaaggttaacatcaatagtgacaaatggtgttggtagtatatacccttggtatgatgtgatgaaaccgacactttaccactgaggccatcttccccaaatcccataagcctgtttaatcatgagataaatatcagacaaataaatattgggggccgttctacagaacacgtgatgacaactcctctaaactgttcaggttatcaaaaacgaggaaagtctgagaaacccccacagccaagagtgtcctaaggaaacatgacaactaaatgcaatgtggtatcctggatgggctcctgaacagaaaaaaagacattagatcaaaactaagtatgagtaaagtatggacttgagttaataataattaattgtaacaaatgtattatactatacgagatgttgataatggagaaactgagtgtgggctatatggtaactatcttctcaatttttaaataaatctgaaactattccaaaatataaggtttgctttttttattaattattgcactttcatttttttaatttttcacatatatatatttttattatactttaagttctagggtacatgtgcacaacgtgcaggtttgttacatatgtatacatgtgccaaacactgcatgttctcactcataggtgggaattgaacaatgagaacacttggatacaggaaggtttgcttttaaaaaaggtatttaggtttttgacctgtgcatctggaaggttggaattgtcattgactgagatggagaagaccataggagaaggtgaattgaaaaaatttgaaatatactagtctagccccatagggcagggatgtataagatacatgcattgtgaatacatcactgttttaatattctgtatttaatacaataaatattttggcagagaaatagtgagtattctagaaataattcctgtcctctttaagaagtacaagttcttcaaagattccccaggaacagctgtgcaagtcagtgtggctttctaatctctttcatctatacttacacactataacagttttttctattgcaatgcagcccaagttttttgcaaggtaaattatttgtaatattcttaggaagaaaaggtagaaagtaaataactttttggtggcttggtatggtgttgtattttgccaataactatttatttccaatagtgtttaatgatatttattggattgaagaaagttagctatctttcaggtatctttcccagagctcacaggacaatatttccagcatgcccccggaatggtagacatgctgaaaatattgtcctgtgagctctgacaatctagtacttgtcacaaataattatttttacaattattattactattattattatattattgctaccattggtatacatacacacaaatatatatatatatatttggtctttttgtgctctttattttgtttcattgatcaacatttttttggtaaatgctatttttatataattgttgcttgtagtattagacctacttctttttgctcatcttttttcagaaatctttaataaattcacctctgtatgaatttcagcatcattttattaagtagatgggaaatcttgggtgtgtcagaaaactatttgcataataatgctgtgtaagaaatcacccaaactcagtggcttaaacaattgtttattcttgctcatgtttttgtggaccagttgccatccaggctgagatcggctgtgcttagttccaaagctgcaagttgggtcctggtctgtttcatgtgtctctcttcaccaatgaccattgagccacctggggcatattcttctcatggtggaaaaagcacaaaagactaagttcaatcttgaaagcacattgcaagcttctggtggcctcacatctgttaacatcccattgatcaaagggaggcccaaaatgaaggggggagtaaagtgcacttcacccaccatgaggtcaagtcaagttacatgggcaagtccaacatcaatggagtgggaagtatactcctcctatgaaggtgagagtagagagagtgactatttgccaaaaataatttcattcaccattctggtggaatatttatgggaattgcattaaatgttaacttgaaaacagacactattagaacaattgccttttctactaatatcttatctacacaagtaattgttaagtaatttgctaaaaaagactatgaatgtacatttcaagtagacttcctgtggtatctagtaggagcttaaaaaatgtttgctaatctgttattcatggatattttgtatttttcttatcttgagtgccagctcttaaaatgatatgtgtaactattttagcatgcaaaaatactattaattttatatatgttttcctgcatttggttgctatactgaactcttctaattaagttctggaagttttgggttttttttttttttttttgcattgtttaggtatgcaatctcaatgtttttaaataatctttttctcatttcttttcaatattgattgcattgactagagcttatcaaacaatagtaaacaatactgtaagatttttaaagacagtacttctaatgtttactcacttagtgtaaagctgacctgacctagttttctttaccatattaaggaagaattcaaatgtttttaaaattatttttctaaaataatgcctatgtgtgttgagtttttatcagatgacttcctggcatctattgaaatgactggatgatttttctcttggaacttctcaaggttgtattttcttattttgaaccaccactgccaattaatttcttttttttcatagtgtgtatattagtcattgttctctagagaaaaaggaccaacaggatgtgtatgtatatatgcgtgtgtgtgtgtgtgtgtgtgtgtgtgtgtgtgtgtgtgtatgtgtgtatagagagagatattgagaaggagatattttaaagaattgcctcatgagattgtgggagtaagccagtaggctggagactcagaaagatttgcagtttgactccaaaggcgatctgctggcagaattcctctttgctcagggacaccagtctttgttctattaaagctttcaactgattggataaggcctatccagtttatgaaggataatctgatttactcagagtctactgacataaatgttaatctcatctacaaaatatcttcacagagcatcccattttgagaagcagcctcactgtgtcgcccgggcgggagggcagtggtgcaatctcggctcactgcaacctccacctcctgggttgaagcaattctcctgcctcagcttcctaagtagctgggattacaggcacctaccaccatgcctggctaatttttgtatttttagtagaaacagggtttcaccatgttggccaagctggtctcaaactcctgacctcaagtgatctgcactcttcagcctctcaaagtgttgggattacaggcgtgaacccccatgcctggcccagaataatgtttaaccaaatatttgggtactatgatgcagtcaagttgacacataaaataaaccatcacaatgtataattcttttaatgaattgttgaatttgaatatttctcagaaatattctttgggttatacaaaattattatcccatataaaagaagaggcagttgaggctaggataggtaatacaactcacccaaagtcacacatgctcaaattggcaggactgatatttgtccctggctccaaagccccaggttttagtcatataatcaattacacagaaaggacatccaatatgctgatacattattcttcagactggccttacttcctttgctcgggagtcacctgcctataactctcatatgtgatttaatcttgattgtttttgttgaattggggaacttcacgaatgagaagtagaggagttgagatttttactttctggcatgagctaccgttaaactgattatctcgctgcagtccacatctggaccaagtacaaaagtgaagcctgacttcttactctgtggtgctgataggaataacagccacaacaccaccatttttgccatcttgctgatgaattgacctcatatttctctacctacatttttcaaaatagtgctcttttatgagttactcaagccccattttaaaagcagtgtggttgataagtatgtttcatacctgcttgtactgagcttttttaaccttgtgctcttgaaataatatgagcttttggacactatgtattcagtacagactttcagagtgaaaatgttgattttcccaaattaaagaactaggggatatggtaatatatgctctcaattttgaattaggtggaaattgacatcgtttgtcagaaatatactgaggataaaaatgaggtaaagttttaggtgctgagctgtgtgccaaatagcccttgtgtttctttcttgaacatctacttcaaagaagcagatttgcctttgatatccctgggagccacatgaatatgaactgactccaattgccctcatcatctccagaatttattttttatttttttagggcatgagtctgtggtcaatttgcttatttgcttctccaaaccagcatgatcattataattctccttttcatgaaataacccactctcagcctgttgttaatcctacctagaggttgggagtggagtcacctaacatgagggcattcatctcttcagtaagtggtgtgcttgtgtcagaaatttttatgcagacaaaaacacaggaatcatcatggcaacagaataatattcaccacctgagccaccttgacatttctcagctagtaggaagctttcttttttcttttgtgcttttaacatagaagaatgcctcctaagttttgcaggctacatagtcatgcccatgagcctcctcttttcaatgcatcctgcccccataaccatttttctctgtaagtgatgttaactatgcagaaagccaattaggagattctacttagaattccttctcttaactgtttctcaaagcttatgtggtataactgctagaaaaagatgtttgaaaaataataatatattctatattggccattcaatgtctcaccttcatgccttagctcaaactggcaagcttctttatgccatctctacatgtagaaaaagtctaccgattccttaaaatcccatccaaaggccatttcctctgtggtggtttgcctgtctcacctccttagcagtcacggctctctctcatgagtccttttaacactttaataataactaataattataaacacatggatcattctttaggttttacaaagtttgttgacacatcatttcatgtaacaaataatcttgtggctttgattatattctccatttttattctctttctctctctttatttatttatttatttatttattttttgagatggagtcttgctctgtcacccaggctggagtacagtggtgcaatctctgctcactgcaacctccatctcccaggttcaggtgattctcctgcctcagcctcccaagtagctgggattacaggcatgcaccaccatgcccagctaatttttgtattttcattagagacgtgatttcaccatgttggtcaggctggtctcaaactcctgacctcagttgattcacctgcctcccaaagtgttgggattacaagcgtaagccaccatgcccagcctatattccccaacaatggagaatattaaacaaataaacacaggagggttaagtaattttttttttcttgagacagagcctcactctgtcgcccaggctggagtgcagtggcgtgatctcagctcactgcaacctctgcctcctaggttcaagtgattctcctgcctcagcctcctgagtagctaggattacaggtgcacaccatcatgcccggctaatttttgtatttttaatagagatggggtttcaccatgttggtgaggctggtgtcaaatcaaactcctcacctcatgatccgcctacctcagcctcccaaagtgctgggattacaggcgtgagcccgtgccaggccaagtaatttgttaagtgacacacagctgtcctctgtcttctgacatcaaatgtcttcctgtgctagctatatactgttggtctcaaattatcattatcttagccaaccgttctggaggacatctgtgtgctaggcattcttctaagtggtttatatgcagcagcagtaatagccaacatcttcttgccagatatccacttagtcttcaaagcaaccctatgtaatagatactattattattccaccatttagaaatgaataatctaagggacagggaagtcaagtaacttattcaaggtcagataactacaggaggctgctgcaagtgtcggtctttccatatccaaaatctggtgtcttagtcagtgaaaatgctgcaaaacctcaaaattgacagaggccaccctttagacataattgctacaggaatattgatcccatctcctcttgtatttcaaatcttcagagtgcattccacagccttttgcctgtggtatccaagaccatagaggcaagaatgtctgggaaatgtaggtgttagattgccagcctctgctgggtaagatggcagaagagcatagaggaaggtaaaaatgaatactgggtaccagtagacaatatctagcatactcgtgataatgatgtaagactactgccatttctttagaatgcgatcctggtgagatggccaatgaatgtttagtcactcagatatgcagtggtgtccccctaccactagggggagatgaacaaccggcatagtttgatgtcttaagaaagattatttgttcatgagtaatggaaaaaaatactgagaaagaagtggttgctttctatggcttatgaggagaagcttatgctgtctttaatgaaaaattaatcagataaacaaatgtccagaggaatatatccagatgtattcctatttacagtcacttagtggatgtgccagcatccaaatgcttccttaatctttcaactatctaagtaatgattgaatagaacctttgctccacctttcctgcttaaatgctactttattagcattacttcttgtccataaccatcattgcctaagtgctctgcaacttacctatttaaatactggatagattgtcatcagttcctcatctgaccaatcatttgtttcaccaattacttgcagattctcattctcgtaatggtcctaccatggaactgttgcatctccctgttttcctcaccacctccagctaatcagggtagagtttgctctaatgagcttatgtctcaggagggcaggtctttctgtgaaaaactgtcaaaactcttctaatgggaaacaaatattaatgtaaatgtaggcatttatttgccaaaagagtagtagctcaagaattgctagcaataattaccctacttgccagtgtattgtgtcttttttgattattcctctctttctatgtagagacctgcctaaaatatctcatgaatttttctccctcaagtgtgcatttgtgaagtttctcgaaagattgattggaacacaaggatttcagtttgtggcgtcctgttaatcaggtcagatttgttaaagtcattagtgttaaaaatttctttgtactcacaattctccttacccagagttagttctgtggcagtgtattagtgtgggcagggtatcttccatcaacttagtgtttttaatggagcttaccagagttaatgacagtggcagtccccccagggaaaacaagacagttggctcagatgtcttgtgggagctgaacctgctagaatgttcttctgggggtttcatcactaatctgccaacaactggagtctgtatcctattagtttctattcactgaagttgtgagatgccatgtactttctttttccagtcatctcatttttctcatcttctaattcgtgaaagggacacagaaatatttagaaaaattgggattctgcaaattgtgagattgattttcctatgttcatctcatagtgttcagattgagataaggtactaacttcactaagctcttaagttgtccactataagacaaagtcaatactacttccttggaaagaaataaggccatgatgagttaggttttcaccatgtgtaggttattctaagggtttcaggtctaatggcatcccctgaggtagtaggtagataagctggtcatcaggttagagcctgtattttgaatcaattcatgtgtagtccttacgaccattcattctacagattctggtatctgcccacctctcaggcccctctctcattgcgccctgtacccacagtactcatgctttgcccattctgaatcattttgaatcctaaattatacagtatactttatatttaatacatttctgaattttcaagtgccagctcctcccctcatttacctggtaaactccttaccttctaggtcttttctgattgtcttcttcttgttggtgtgctcaggttcctagtgtagcttatacctgattcaaccagaacacctatagcaatttattgccatcacttttgtgcagagctcctcttatataaccataggcccctgaaaggctggaccctctttgcatctcaagtcttcttcttccattccctgcctgccattagtggtgtctccatgcaggaagaagcatatccaaaaatattttaaattatgtaaatttcaataaagtatttatttcaaccctcagagaaaatgagatcagatttgtacagagatgtggttctcctcaattgtggtaagtttaatgggtgagaatgctgagcaagatttgcattgcatacaaatcacaggaattaggaccagtgattggaaagttcaaaggaagatttaagctcagtataagtaataactttctgggcattaagactgttcaaaaatggaatgtgctatcttttcaactagtgaggtctcaatgactggaagtatttgtaccaagactcataaggatgctatcatatatgttctcatattggtttggaagagatgcttggcagtatcttttctaatcttaagattctatttttatttctgtaaatcagttcaaatgttaacttcttataattgccaattatggcttttatattcatcattattcatttgatattcatcatcagttaaaatttttctattaatcagtcaatgaaaaaattatcttttgcctcactcttcagtgaatctggctgtccttggttgtccatatttcctttcacttctttctatatacactataaaattaatgagacttttaaaaatctttcaattttagtcaataaatatttgaatgttgggccagatgcagtgggaggtacaaagaagatataacattgattacagtagctagtgtttatcaagtgattactggcattttacatatatggactcatttgtttctcacaataatgctatatggtaggtactattttcccattttatagatgagaatcctgaggcacagaaagattaattaattttccaagatcatattgctcttagatggaagaacacaagcaatctaacctaaaatctgaaggtgtaaccattaagcattactgcctcttgatgaataaatttaataagataccatctcttgccttcaaagatgattccacctggtagaattacatgtatttattattcactggataaggctgttcttaattttacttgttgtaaaaatttattctttcaaacttgtctgcattgttatcacttgatagtgttctggcactggccaaacaaaaatccatgtttatctaatttacaccacttatgatattctaaacttgctgtgtaactatatatgtctagtttgaactcaaggtgatatgattgtatctccatgattatgttaattatccttccctgagacttctccatttaccttttgcttttgtggaaatcacaacagcatacaataatccaatgacaaatagaccttttgatttggatatagccatcgttcccacgtattaaatgcatactacatgcagaatgtctaggaggaagtagaagatacatacacccaacaaaagataccatgttagaagtacaaataaagcgatgttggacaaatgaagtgaaattagtagtcacagaaatgagattcaccaatatgcctttctgagcatcttcgttggtatttgttttggagtggtcattatgttggtaatctcacagtaggcaggtaataagttacagtgattcttcccaatcttgcctgaacagactcctcctgtaaacacagctgaaaccctagaaagtataatttagaaaagcaatttttaaattttaatatgcatcagattaaactgaaagatgaggtaaaacaccaattgatgggccccagccccagggtttccgattcagtagatgtgaggtcagtttcaagagtttgcatttgcactttgaaagagctggaataatactaagaatatgcataactcctgggtgtgcattagaatcacctgtgattctggtcacaaaaacaatcaccaaacttctaaataaagacccaaagctcttctaatattaaaccctgagataaatatgagctgtatatatactttaaaaagatgaataaaataagtaaaggaatcatttacccaatttttgatgaatacgtgagtggcagcagttgcggtggtaagttaaatcaggaataaatgtttgcaaagtgaaaattgtaagaagcatctcctcttaccatgcagtttataaacaatcacaaatagggcaggcttgctgagctccttcatacctggcgggttattgtcatgaatttgtatgattattgtgtactttacaaatttttgttttacaataatttgtatttattcattcattcattttccaacccatttattccagctcagccgtgaggatggctggagcctatcccagctgcttagggtccaaggtagtaaccagcctgggacaggatgtgatctcatcacagggaacacacacacacacacacacacacacacactcacactcagtcagattgggaccatttagacacaccagtgaacctcacgtgcacagctttgagaggggggaagaaactggagttccagagaaaacccacacagacatggggagaacatgcaaactccacacagacgttggccctggcaggaaattgattttttttcttcatgaacataatgaaatgctgttaaataaaatgatgtcgttcaaggacttgctgtaattaattgaggcttttagtatctccttttccaattatgttttccaattaccaaacattgctcatcacataatagatgctcaagtaatgtttgttaaacaaatgaatatctcttacgataaaaaatattgcaccaggtgggttgactgaccagatatttctaaccatgctggaatgacttatttctgacaaaaattattaattttattgatccaaaaggagccatgtaaaattgttttcctcttcttgcttgctattttcaatttttccaatttgggctcagctagcagtgccacagctgaaaaaagtgcatggattttaataaggactcctattgctgagaaggataataagtgagtctggagggcagggtcatactctcaaagcctttctgatgggagccaagattaaaatgcacagcaggctgagagggctgggaagaagctatgatttctcactgtggatttcctcagagtgccattagtgtaccaaggagaacacaggggagattgcatttacatgaggaaagcaagttagagttcagtgatcttgaattttttggcattatttcaattatttgttggaataatttaactttggcccaaaacatgtgtcttagtattgtatagatttgcagggcacagaatatttctggttttcccctaatgattgtcatggaatgcccttaaatttaatgaataagtgaatcccaagacaatggtatagaggtctctaattccaaacagtaatgtatttttgtgaaataaacaaggctcagtatttccattcgattcggtggcattgatggaatctgagcacattgggcacttcacaacacagtcatattcttattcaatcttcattagaaattcatgagataatcattgtgctattaacctcattatataggtgaggaaactaagtcactaaaagtttaaatgactggtccacatgaaaacagctgatgagtgatgagggctgtcaagacatctcaggttttttcttccctggctcaatgctgctctacccagcacctctgtggacaggaactccttttatcccccactcatttgatgagaagtatatgaggccagggaaaggcaagtgacatggccaagggcaaagggcaaggcattgtgagagtctgttcgggaatcacatctgaatctaaggagaaatccacatcgcctgccatcctaaagagatttcttagttgctccccctcctcattgggtctgtggtgtatttgtgaacaacagctgcatttgcaagtagccaggacttcctccagatgacatattgcgctgccagagtggagacaagcggggctgacttcacaggccaaagagggcatctgcatttgccactcagccccaattattcgaatctgctcatggcaggaggaatggtgggtcccttaggcacagaggccagcctctgatctccagactctctcatttctcctagatccgccccctcatgttgcttaagcaaaagcagggctaacccccgccccttggacaaggggcacatcattcctgcattccccaagcactctctggctgctgtatcagcaattggatgcttgcccaggctctgcaggactctagagtctagagcctgctggcccagaggcaagaggggtgccagatgtgcgagctagcaaaccgcggaagctactgtgagattagagtggcacagaaatagtcggaaaattaccctttccactgggcttggaatccagggtaactgaggcagcaaacaaacttctgtgtgtgtgaggtgtcccagtgtaccagtgtcctccattcgggggtgtcttcttcttggaaggaggactttttcttttaacccctaaagtgtcagggatctaaaagctggttggcaatacttgatgcctaaattgtggcctgggggtcacgatctcctgggtgctagttagaaatggggaatcccctggcccagtccagacctatggaatcaagatctgcattttaacaagatcccaaggtttatttgcatatttgagaaggcctgccctaaacaacactcatgagcctggggagaatcttaaaggcttgtgagacaacttgagggttgtgacacttcctaggtacttttgtagcctacactggtcctgtgtgattgggatctacgtctagcactgggtctgtggcgatactaacttccctgtctttcctggcccagactgacatttccaaagggctgcgtgaggtggtacatactcaggcaaggcattaacagtcacacaggcgctccagggctttctcctggcagtgcttgagccacgtggccctccatggagcacctatctctatcttggaccttttagttagaaagccaacagctgccctgcgtgggggaactgcacagtatgctaatgaaggagcagcatactgaaaatgatgttgtggctattaacatttttatgggtggactgctttgcaaagcatagggaaagtattactcttctaggattaatatatttaacaaaaagtctgccaggagaggaggtttttgctgataaatataattctgctgttgatttatttagtaatggagacttgaaattacaggaatcaatgtgtatatggaagccattgtcatttggttaattatgttttgccagcaggatggggaagcactttatgctcgatgcagccaaatgtatttcagccagaatcctgtgttataaatgacgaacacataaatgtagataaagagaaagacccctataattctagattcctggacacttgatcctccagaagcttgacatccctggccccctgcactggggctgtagcatgtagcataagtaggtctgcttcctctatagcaatactccttaacggggcttattttgcacccatgggatatttatagatgtctggagacattttgtttatcatagctgggcagggaagatgggcaacaagagagtagaggccaaggatgatgctgatgctaagtagacctacaaagcaaaagatggcccccacccccacccctaatgaagaattatttggctcaaagtatccatagttctaaggttgagaagccctattctagggcattcctatttgagattctgactcaaagaaatggggtgaagtccatattctctttgttgacaaataaagaaaataaggtgtgggcatcacatctggttatgtagtattatcttccaagatatccacccaggatggagtcaagatgagtgtatagtaggagagtctggaatagctctccaaccactgtcacttatctgaagaggtctaacactgtcaattggtcgccatcctattgtgaagatcatccccaaccttcctttccctacattctgatgaaccagctgtggtttggaaggcataaactttgctacagtcacagctgtgctatttactgagtgatcctgagagtggtaggcagtgtaatggccctcaaagttgctcacatcctaattcctggaagctgtgacctttcatggcgaaggggacttgcagatgtgatttagtcaaggatcttgaaaagggaagattcccctgaattttctgagggggtccttgtaagtagaagatgaagacaggggagtcagattcagagatttaaagatgcactgctgctgatcttgaagatggagtgaagctgaaggaaggagccatgagccaggcatgtgggaagttcctaggaaaaagaaaagacaaataatcagattcttccctagagcattcagatggaacacactcctgctgataccttgattttaacccccaaagactcattttatacttgtgatctccataactgtaagataaaagatgttagtggtaatttattacagcagcaatgggaaaccaatgcattaaggaaggcatttttccttttgaatgtcccactataaaatagggctttatccactataaaataggtgttgctcatttatttgttcctttattcattcaacaatcatttattgagtgcctactatgtgtccaccattctaggcacttgggagagagcagtggaccacagagaccaagcaactcctctaatctagtgacaggagactgataataaacttccaaaaaaatacagaaatctacagtgataaatgttatgaattcaagtgaagcagggtaaggcaaccggagtccacatctatttcttacaaatcattcagagcaggttctgtgataaggtgacatttagcaaaaacctcaaggaagtgggagagaaagtcatacagatattcaaaggaagaatatttttaatagaggaaatggcaagaatacattccctgagctaggagcttgattctgagattcaaagagcaagggaaccagtgttgataatgataataattacctcacaaggctggtatgagaattttgggcaacatacatgaaaccccctggtgaatttcaaaacactatgcaagtatttagtcatcattgcatggtccctcggagtgcattttgggggctgccaagggatgtgtagggtgacctttattttgtgtctatataaaagcgaaagggaaatagctattggcctcaggccatggaaattatgcacagaggcctagaaataggagtattttcccaacatggagctgatgattgatgatgattctatgtgtgtccttcacagtggcaaaccttcaaggggcagggacatcattgctgctgtagtccttaaaccctgtggtccagaagggtgctcccaaggtgccaaagggggcccagagcagtcggcttttctgtcatgggggcatacaaagagagaaatcatcaagaaattcaaagacctcaactcctgcctggccagggcccagagagaagcagttaggatagcctctgatacccagccttgccagcaactaatctgccagatgatgaaattgaaatatttgaaatataatccatacattctttttccaagacaggtggtgaaatggtctagtttttacaaaaggctgagaaaattaaaatactaaaatgttgcacatctttgtgtttgggagtaggacttcccctggaagctggggtggggattagagaaggcttcccctggaagctggggtggggattagagaagacacctctcagaatctagagctggcccattaacaccttaggtttaaggagctttctcagcccattttgtatttctaatcttaaaatgaccaaggcaaggtcacagataatatgtgtatttcatccttctttatgctgaagaatccgcttgtaactgaaaggtattttgtatattaattggattatcaggttagattctttttcctaaatgagtttctttaggccgtttctgcttgcttttaaaaaactttagttttaattttagatttaaatggtacaggtagaggtttattatatggatacattgcgcgatacggagatttgggcttctgatgatcctgttgcccaagtagtgaatacagaaccctgtaggtagtttttcaagccttggcccccttcctccctcctccgttttggttgacagagtctgcagtgtctaatgtccccatctttgtgtgtgtgtggacccaatgttcagctcctgcttgtaagtgagaatatgcagtatttagttttccatttctgtagtaattcacttaggataatggcctctagcttcatccgtattgttgcaaagaaccttatttcattgtttaaaatggctgcatggtattccatggtgtgtatgtgacacattttctttgtctaatccactgttgatgggcacctgggtggattccatgtctttgtgagtaatgctgtgatgaacatactagtgcaggtgtctcttggtatatactcagtaataggattgccagctgaatggtatttcacttttagttctttcagaaatctccaaactgcttttctttctttctttctttctttctttctttctttctttctttctttctttctttctttctttctttctttctttctttccttctttctttctttctttctttccttctttctttcttttaattatactttaagttctgggatacttgtacagaatgtgcaggtttgttacataggtatacatgggccatgatggtttgctgcacccatcaacctgtcacctacattaggtgtttctcctaatagtatccctcccctatccccctgcttcctaacaggccctagtgtgtgatgttcccctccctgtgtccatgtgttctcattgttcaactcccatttatgagtgagaacatgtggtgtttggttttccgttcctgtgttagtttgctgagaatgatggtttccagctttatccatgtccctgcagaggacatgaactcatcctttttaatggctgcatagtattccatggagtatatgtgccacattttctttatccagtctatcattgatgagcgtttgggttggttccaggtctttgctattgtgaatagtgctgcaataaacatacgtgtgtatgtgtctttatagtagaataatgtataatcctttggtaatataaccagtaatgggattgctgggtaaaatggtatttctggttctagattcttgaggaatcaccaaactgtcttccacaatggttgaactaatttacactcccaccaacagtgtaaaagcattcgtatttctccacatcctctccagcatctgttgtttcctgactttttaatgatcgccattctaacggcatgagatggtatctcattgtggttttgatttgcatttctcttaatgaccagtgatcatgagcttttttttcatatgtttgttggctgcataaatgtcttcttttgagaagtgtctgttcatatcctttgcccactttttgatgttttttttttcttgtaaatttgtttaagtttcttgtagattctggatattagccctttgtcagatggatagattgcagaaattttctcccattctgtaggttgcctgttcacagtgactgaactgatttgcattcccaccaacagtgtataagctttcccttttctctgcaacctcactaatatctgttttttttaattttttatagtagccattctgattggtatgagatggtgtctcattgtagttttgatttgcatctctgatgattagcaatgttgagcttttttcatatatttgttggccacttgtatgtcttgttttgagaagtgtctgttcagtttctttgcccactttttaatggggttatttgtggtttttttcttgttgacttaagttaatcttatagattctggatattagccctttgtcagatgcatagatgtaaatattttctctcattttgtaggtcgtctgtttactctgttgatcttttcttttgctgtgcagaagcccgtccgtttaattcagtcccgtttgtctatttttaattttgttgcatttgctttggggatcttcatcataacttatttgcctagtccaatgtctagcagagtatttattaggttttcttctagttgttctctatttttttgataaaataaatgcctacattttgcagaactgaaatattaatgtgtacatgttattgtctgagtaaactttgtttttttagactcatagtaacaaaaggaaaatagacatctttagcaactctttcagtaacagaacatcttttgtataacctgaacttttatgtcagttcaggaatataagaggaaaagaaaggaaggcttggcaagataggtagctccctatcaggagaaacgaaaatgaaaagaccgtcggatcagtgtatactctgagttctgtgggagctgagtctgtatcctagaaagcatggaaaagtagtctagggcagaaataaaccaggcatgctgccaggatgaacaactagaaaaaccctttggaaccatggtctgtcaaatgctgatgtgcaggcagcttcctctgtccccaaggtcagaagaaattcctatatcgctacttctttcttctcctcaacatctgaagcaaaaccctacagagtacaaaggtaaagtgaagacaaaacaagtccttctagcttcaaaatgctttgatattctttgtcttttattttcataagacttgatagcatgttaatgccacagaatagcaggattcccttccattatatgataaacatgctagtgaaaaagaattataaaaaaaagttttaacagaggaattatggcaacctatgagaattgcttcaagtggaatatatattcatgtattcatcaaagagttgtggtatccactagatgtcaggcattgagcaaaggattggacaaggggcaagtagggcaaggccctattctgggctcctggaattcataatataaatggcagcatagacaaatatgcaaatgaacaaatatgcagttgagttacaaattgtcaaaggtgttatgaaagaaacaaacatgatattctgctagagttatgactgacaggtaaagggtgagtacccaggaatggccttgctgagatttaatctgagagctgaatgatgagagggagccaagtatattgttataggtcagaaacagaaacaatttttactctggctcttctgggaagacatgaaagcctgtgtttacaaaaggagattttgacttacctagtcacatgatctaaagaaacgcttttactcttattcttctaaagcgacatttcctggtcccccaccctcctgaccacatttcatattctttttccctgcattatttttttctccccaggtattataaatatatgacatactttttcatttactaatttgcctggtttaatgtctgtctccaccactagaatgtaaactctataaggaacttgtttcatccattttgttcatgatggctgtctctactgcttagaagagtaaccggcacatagtagatactcaatgaatatgattcctgctatactaagctatttctttttgcccctggagagggagatatggaattttgaaaactgccaggtctggaagaatatgctatactttccaaggttgttagatttgaatgagaaaaatatacactaaagtgagttccatgctggtgtatagtaaaggctgagtaaatatcattcttgggtacttccctgtctcttttttcctaagcacactcagtgaggtgggagctgtgaaacgttatgaggtaggagaaggtgatgtctaatgtttctctactgccctgttggcgccccccaaccaagtctctctcagtgcctttgcccagccttcctctgcacacactacagctagctctatcatttcctcatgccccatcaagtcctacctgtcttcgcagaccctcaggttccttggctgtggcttacaagggacatctgattaatctgtaaccaattcatgttgatcccctagctgattgcctctttgtcaccatgaggccagctccttaccatgtgtgggtgcagcaagcaggtacaccatcaccctgcttgtgggatcaggctccttctcccccggacagtgatgaggagacactgtcttcatttgcctctttacctttcccattttaaagctgttgactaacttcaaaaagaatctttttgaattccttttactcatagaaagcagaacaatggaatagtaaggaagaaaagagaaatcaaggctgcagaagagaagacagaggcacagggagagcacagagtagagagtaaggggtaagagaagagaagacaggagaaaagagaatgaataaaagaacaagagagaagagaagcagtgggtaaacagcctgttagatggtggcatagcttttacccactgaaaagatgttcacagcaaggtctatcaaaaccctaccacagtatagcagctctaccttgaaatagtatttctaatgataaaaataataacacaataaagtttagtaaacagtatgctaagagctttgcatatgttttctcctccatgatccttttgattgaaggcaaattttgtcatcctatgctcaaaattcttcagtcacctctcatcttactctgagtaaaaggatggggatctgctccccaccctttcttccaagtaggacccattcctcagccccagctcagacagtatgcccctcccactctctctcttgctccctccattccacacacactggtctccttgctatttttgatcaaaccaattgtccttcctcagggcctttgcactggctattgttttgcctggaagagtcttctcttagatgtcctcctgactctctcccttacatcctgtgggggacttcttcctttgcttcttaagcaaaagtctcccatggccaccccctataaaatgtcagcccccactaccatctcttcctcctgctagctactcccccactttgctttaattttctccatactacttatcaccaccaggggtataatgttattttatgtcaattgtttgtcttttgcctccagattatgagtacagggattatgtcagctttcttcttgattcatacatcgtcggcacttacccctcgaaggtggatactgtttttccttccgtagtagaggggaaaaagtaagctcacaccaggtaagtaaattttccaaggtcacagacaggaggtggtgaagccaggtttccaacagagctgtgtccatgtccaaggcccatgctttcaaccactgtgctagaggattccccaacggctttccacactgttaggacacctgtccgaaagggtaggttggcatttcaggagatgcctttctgtgctcagtcaagatcaatgcagatgtaattgtgtaaagcaagacaggactataaggcagatataactgcgtaaagcaaaacatagacttataaggcaaggttggtacaaatgcacatggctaaagcttgacctgtacgatttactttggctgcaatgcacagctacagaggcagtggggtatggtgtgtggtggttaaggacatacgttttgtgagatagatgtggcttccaattcctacggtgccactacttagttttgagaccttggccaagttacataatgctcctgagcacccagttccttctacatgaaatggggctggataaatggaaataatgcctacccttagagttgacttaaaaattaaataagggaatgtatacactgttcttagcatagtccctggctcatgtaaatattcaataaacactaaataaattactattattataattattatgacgtttacttagtatatagacgtagagaaagttttagttgaaattgtatctgttaatacattattattttctgttaagaatgaatatctacatttggaaatagaacaaaaaaagagcttactgcatatcctttcactgtcatgccacagcattgtctaatgagccgtccgtcctaagggtcatctcactctgtcagacaatgtaattttgtttggcttaaaattaccactgattacagtctagcctctgcaaagttgatgttagcatgtagaaaattaataagatgcaaatcactgctgtccaatagagaggcaaatgatttctaacaatagagaataaaacagtagagaataaaatgttaggattttattgccctttagactattaagcagttttggatatatgacttaaaaacgttattccagcagtcttttccccatccatccattcatccacccacccacttacttacctacttacctatctcagtttcttgcattctccttgaatccactttattattttgttggttcctttattaatgattttaatatatctttgatacatccccctatgtatttgtatgagaataagtttatatatatatataccaaaatacaatacaatacttacataatatagatgtactcctagaaagcaattgatggtatctaagctatttaatcttggcaaaccctatcagatacctagtttctgtgctgctactcctgatgatattgactccttataagttttactgtacttttgcttactaaatatcagaaaggtataacatagtgtttaagatcagtggctctggagtcaaacttcctgggttcaagctcttgctctatctatcactaattagctctatgatcttggaaagttgcttaacctaccaacaaaatgaggccatatgaatacctcttatctcagagaatattttgaggagtaaatgcaataatgtatataaaagtgcttagcatggtgcctggtccatggtgtttaataagtattggttattatgatttatgattgatcttcattttggaacttaataaagaaaatgaaactttgcaattctattgtgaatgtttgattttaatacttcctcagcaaactctggtagtaattgcataatacgacaactgtttttcgtagaagcctaccaactagaagttctgaaagcaagtgtttaccatgaaaggtgtttaactcttagagagccctacaaattaaaatagcctacacagaatacaactgaaaaatggcctctactgtttattttctaactttctacactatggtacagagataacttattgtttagtagtgactggtctagtctgttttattgacttgtgcactttctgaccctgtctaatttagtgtcagagatcacctgtgatttttgtatatttccgaatgtgtaagtatctttcccagtaacttgtacattctgatttcctttgcacatgagaattgatgtggaaaaggcagctgagcagaggttggcaacctttctgaagtgctatgccaacttcccatttattcactctaatttaaggttttccatgccaggatgaacctcctatcatccaaaccactggagactgagaacttccaagacagagcaaggctacagaaattgaaattttcattgtatgatagattttccaactttttttctttcctgaaaaccaagaactttgaaaatgctgatgccaattttatgcaacccagacagaacgatcatatatgtagggaaggggttggtgaagattgcagttccaaaacctcctgaagcttttcatacaacatttattcattcatgcatgcatgcctatatatatatatatgcattgtgcattcatttagtaattcattcattaaatcaatgttgagcgtctaacaatgtgccagccactctggttatgtatttacatatacaatacttaacttttttgactaagtgagagaacatacttcatgcacgtagcagagtgcctggctcatagtacatactcagtaatgaaaaccattagttttaatcttctgtttaaaattttacaaaagtaataaatgtacatagtaaagaatctaatagtgcagaagagttgaaataaaaagcagcaattccccatgctgcttctgttttctcccaatcatattctccagagccttaattttaaaaaaatcagttcttctgatatttacatatgtaacattaaataatgcaagtaccagtggtgtgtatcctcccctagactctcatagggaaattctctgcttgttcagcctaggttcaccttggccaggggtagagttccctcttatcacttttctaatgagattcttaaaagtgtccatgactgttgaacaccagacttgttgtctaggggaataaattggcgtggaggagaccactctggaggacagctcatcttctaagtcctttttgcatgcactgctttccagacctgtgtggaaggcaatatccttttcatcccttcagaatttcttctctcttcttgttgcctcttgcttttcttacatgtttctctgtgttctgggctttccaagaaaaaacaccctgaaagcctcttagtctggctttttgaatttttgttttcccccttggtaaggactgggggtggtatggcaagaggaaaatgacccaaaagatttggagggaaatgcgcagaaaacagctagattaatatttcaagatagaaccatcctgatatattttcttattttactattctttgatttatcaacttcagacattatttattgactcctctctataaaaaaggaggatttatctcatgcttctttctatctgctcctctccttcccaaagttggatcattatgttagcattttggttcttctgttgtttctctttctaggtttaaataacaaacttagatctctttgcatcaccttgaggcagtgtctcttgtctgtccagcaagatgagggtatttgctcccctatgcttttctcccctttttcattgtcaaggttgctagtgttctattctatagatgtatttaaagtttctaagttttatatatagatagcttgactataaaagttgaaaaatggtatacaagatttattttataatgtcgcttagaaaaatttgaaaattgactgtgtattagaaattattcactcaaatgcattattcatgtaacatttctgttggttttttttcaacataaaaatttcaagagaaaacctagctcatttcaaaatccagattttaaaaaggttatttttgatttttattttttaaagcaacggggtctccctatgttgcccaggctggtcttgaactcctgggcttgagtgatctttccttctgagcctcctgagtagctaagatgacaggcgcacatcactgtccctagcacaaaatccaaattttcaaacaagttttaaataggtaaactttatcatgcttttatctccctcacaagatttactaagcattgggttcaaaaagaaatatttaagctttaatttttaaaggaataactactgacagttaataatattaagaaaaagaacatgaaaatgtcttttgaatgacacattttaaaaacattagtttgaatccgatttcttcagttcaagtgcaattaatagtctaataaaagaatcatcaataagatgggtaaatgtgtgaatcatgtcttagatttttaaactaagacaagttgaaaataaacacattttctggcttcatagataagccttgtgttatatcaactctgtgacatagattaaaattacaataatggattaaaagtattattttatctcatctaaaacatgtaatattagtactgtaatgtcttttagtacttacactaatatatgggctgacagtggtgaaacaaatactaggttcctgaagctttcctaagcattataattctgatatatgatcatattattttcaacaccacatctcaattttctgacacattttttacttttataattctaggatttgcagcatcacattcttctctaactccttgcttatgtgactaagaaaagtgtttaactaagtacaaaagttcagagtgtaacttagtgttaagaagtaagccagattttgtcccagatcttacatactaatcagctttcactgagagattaatttactagaatttcttttgagtgtgcgtgtctccattcatacaaagattcggctacatttttcttttttgtgtattagctttgtcaagtttggcattaggcttatgctggttttataaaatgaataactttctatctttttgttcagcctgggaacaaattatgtagcatagtcattttttgaagatttcaaagaacgtttttcaaagaaatgtgtgggcctaaatatccttttggaaatatttcatttataacattttcaaacattttcataattatctatattgttttaaactccttcctgagtcagttttaaacacttgcacattcccagaaaattctctttttatctaaattttcaatttttttagtataaagactatatggagatctgtgatatactttaaaactactataacttttttttataacttctaacttgttttgtgctttctttttttgtctttgttagagtctccatgtttgcccattttgttcgtttttctgacagcctagctgttgaatttatttgtccactttagaattaaaatattgccaaatttattcttataattaaaattttttcagagtttatgagaagtaggataatcatatatcccagttgcctggcatattctggtatatgccttctatcccaacgtaattattagtagtactctctttcctccccaaaatacatcagttgggtaataaattatgtggccactctaatgataagtgaaacatacattttcctctcaatacaatagcaggctataattacaatgcataattataattacagatattgtctcatcccctgggatgtgaaaattcatgttgaggaggttggggtgggggaaggtcaaaaggcttttgatattataaatgtttgtggccatccgaagggccatagtacctaagtagataacgagtttaactgcagtatcaaatttcatgtgggagggggtataagtaggataaaattgtcttaaccaggctccttagagggacaataatgaaaaaagaaaaggttgagaaaaatgttataatgctgtttgaataccaccattgattagttcattttatttttctccttaatagtcatttggtgttttctaatttgtaagtaaatatagtttctgtttaaacaataagttattgtttcaacactgaaatacccttgttgacatcatcagtggtcaacattgtcaacacattgttctgtgtttttggctgactctgcttttcaataccgtctgtccaacttgactatttcctcctttttttttttattgagaatattattgggctcataggattaaatgaaataagatagtaaggcattcagaactgtgcctgtccctcctgctttccctctgtctcactggttattttcaaactttttggtttccttttttttttttttttttttttacctccggccaatctctaattgctggagtgctaaagagcttgagctctttttcttctctatctgcattttattcctgaatgacctaatctaattacattgctttaactccttctgtataactttatacctccagccctgactcgtaccatgagcctctgacttgtatattccattacctgcttgatatttccatgtggatgtataataattatcagaattaggtacaggctcaaaactgaatttttttcttcacatctgttctacattcctcctcgttcctataaatggtattgccattcactcagtttcttaagtcaaaaacctaagatgcattctagacatttctctgtctgccttcctccacattccatctgccatcatgccagctggttatatcaccaaacctgtccacttctcttgattttccttgttactctaatccaagacaccatctgctgtcacctacattctccactggtctcctgcttccactctcatcttccagccctcaccctcatcatccattctccaaagagatctcttaaatatacaactagaattactccactccccttcttaaattctttattgggctttcactgcagtcagaataaacactgaactctgtatcatggccaataaagaaccatgctcccatctcctctccagccaccctggccttctattctcttaacatgcctaaccagtttctgtcatgggcttgcttgctgtttcctctccctgtacgttcttcgggcccacgcgtttctgtggctggccattcttgtctgagcagtctcagctcagttgccaccccttcagagaggcttccaacctggcaccataactaatgtcagctcctttctaccaatgattattgagttgccctgcccaacttttttttttgtcaaatcattgttcgtttgttttgaactggagtgtttattgcagaaatttggccaaggttccaattgagtgactccagctgaggttagactggggccccttgcccagggctgggcacctgagacaggaaacagtgaagggatctgggcctcagagctgtgagatagaactggggaccaggctgcaggtgaggcctgtatggtcaggttcatgcaaggccttcaccacaccatcctctatcaccaggaagaacctctcaagctctcatcctcaaagagtggcaacagcaaatcatctagtaacaaatcagtctccttcccagaggccccagggctgccacccatgagctggccttggccttctgcactgtggcctgtccccactcaccagtcacaaagacacaaagacagtggcacttaaacatggatctggcccccctttaccttcagaaccccagcctactccccaaacccaagcaggtgggtctttgacagttggggtgaaagccccagggattctaaacagcacacccttctttccctggcatagttctgtcaggtccaccttgttcccaggctccctttcaaacaccactaatgccaggatagcatctcccaccatgacaggtgccatggctgcaaagttactgctgaaatcgtgggtccccaagcatccactctccttctctttctagtagtcacgctgctcctgctgctgctgttgctaccactgctcctgctgctatgattctatcatagcagccccagtgaggaccaacccagttcaatgtttcagggcgcacagttgtgccagctccaggctgggccctgtggctgcgacagtcctgtctctgtggttaggcaccacctatcctattcagccttcttagggttatcttagtatttggtatagctccttcttttctgttgtcctcccagcgctatcatgtcagttccgtgaaaaaagagacctgtttcttcattcacaatgcacatgttctcagtacctggaacagctcctgtcccacagtaggtatttgtgtgtatattttatgtaatagatttttggcttaattctcatggagtcaaatgatgaatgtgaaattcttaaatgctgaaggtttgctgtatttagaagtttttgttgactgatgggttggttggttggctttaaagtgaagtaatccatcaggttttatgtatgtgaacttttatggaatttggtgaagtgtgtgcctgtgtagattagtatataggagagaagtttttatttcttttcagatgattagttatgctttgccagtatttcctcagaacttctaagagtgttggtttggggggatgtattcagtattgacaattccacgtttatctacattcagctgtcaggttggttatttaaccattccgaggcttttcttttctattatggtcacttaaaacaaagtaaagcaaaatgaaactagactgttttggtaagcttttattgaaataagaggggaaaatgtaaggggtaaaaattgctaaattatttgaaattatttttggatgcagaggttgactttattgactgaaacagaatttaagtccttagcatcttatctggatgttaagaattgcctatcttttggttgtttccagaacaatcatgtaggttcctttttgcttagactgaaaatgatttgggatgaagtaaaaaattcactccctcacaatggattaattttttttctcagtggagatgccatgcggtcagaatttcttgaaaatgacccacaagcttactactaagcagctttgggccaatgagcagtcttttaaagaaaacattttatttatttttctaattggagaataatctatgttcattgtaaagaaagaaaatagaaattatgtatattcctaccaaagacaatttccattttagtgtatttcctttcagttctttttctgatatactatcttttctcttctgctttgagatgtgcattgtgacttccctttgtgataaagaggataaatctgctggctcatttccttttatagactgccaccttctctaccaacgaagaaaatgtgcattttggattttgcttgagttgaaacaatttatgctggaacaattataaaaagtagcatctgtaatgtgaatttggcccactctgtatcagaaaaaaataacttccaccatagcccgagaggaaactttaggtatctatcaccgatagagccaatgcttttaatacatatttcatgatcacagctgaggcttttccaaactcagagtgctgtatcattcattcactcctttaaactacaagattatttttggctctttgtgttggcacataggcctttccattgctgatctgcatgaaccatttatcaagtcaagggtttaatctatcaaagtcagagtttcttttttctgcctgtctctgtctcgctttcccagatggtattgtctcatatgtgtacactgttggcttaaaaaaggctatttggaatgcaaaggtttatcaagtttctccattttttttcaaaataatatattatggagcaaagtgatattttataggcaataataattatagtgttgatcaggttctaaaacattacattaactataatgtcccaaacctccttcttggctaatattctggttccgttcttgccagtagctcctattttctctactcactcattctgaaaacttgaatcatctttgattttcctctctcccctttccaaacatttattgaattgtcaaattatttggattgtatctcctggatatttcttgaatccatcctccattgcctttgtgtactggactcatgatgttgcctgttgtcttcaaagaagcaggcaattcattttgaatgcttttgatcggatccaaatataaaggccaaaacaaattaagtaatttatttaataacactgactccttgccgcatgccaacccccgatctagactctggtgatatagcaatgaacagtagggttaaaaaaaaaaaaaaaaaaaaagcctaatagaatttacatgccagtgcaggaacaggggagaaagggacaaaaataacactagtaagtaaattataggatgttggatttgttaatgttgttatgaggaaaagtaaagggatgaaaggctgcagtgagacctagggtggacagggaagggttagagttaaatcaggtggtagggatgataatgaaagttaactaaaacttaaacaggcatcataaacaaagagaatacatcaaaaagcattctaattatgtcagctagtgtcctgaatcccccagtcctgatacctaggatacatagataatgcacagggatcttcgatgcctgagcataacgcaatgagaactattataatagccaccaagctgttctccctctctttgagccattcccttcccaggtcagcactttcagcaaaaccgtattgcggtctaaacataagaattgtgcttaggagaaagtgctaaagttgattcaaagaggcatgtccacaataggtaacccaaggtacgcaagaagaaattccaggggccacagtaagactcaaatcaaaatcaagaataatatttagtgaattcttactgtcaaatgaaaaagtctaaagtctttagcctaatattcatggctctccagaaaatagcttaatgctagttttcttttttcttttctttttctttttttttttttttttttcatttttgagaccgagtcttactctgttacccaggctggagtgcagtggcgtaatctcaactcactgcaacctccgcctcctgggttcaagtgattctcataattcagcctcccaagtatctggatttacaggcatacaccaccatgcccagctacttttttgtatttttagtagagacagggttttgccgtgttggccaggctggtctcaaactcctgaccccaggtgatcaacccgccttggcctccaaaagaccatgctggttttccaaccttatttcctagcactcatcttcacatccttccacatgtcttccaatttccttccttgttgtctttatttggatggaagatcttctaccacatttttaggttccaaattctatccttccagtgggactcagatcagatgtttcctcttgtatgaaagcttgacagaaatcatcacctcctctttagaatgttaataacaaactcttttctggcatctggtattatatttactatatgtgtgtgcctcaacatttctgttagactaaagctctttgagggtagccatctggtccggctgttctttgatcctttccccttggcccacacagtgttcagcacagatgagggaatgataacaaagtgctcagtggtattttcaatggcctagtttttcaatggcaattcaaaaatattgttgcactggagtgcctccagatgaaggtcctagaaatggtaaaatgtcatgaaatacctaatcagtcaaagacagggaatgtttagcttggagaagagaaaagtaataataggcaaattttttcagtattcagccccctacctgcctccctgccaacatactacacctttttcattatttttattaactgaccttctggctatattcatcagtgctcaccacttctttttttaaaaaaccattttctcccctcagtgcatagggtatgtctcgaatctctccatctcttttgctggcttttttgcccctatcgaatctttaaatgttagaatctaagctcagtcttagatgccctattctcagttctgattaatcgatgcttgtggcttcaattttaacctacatggtggagattcacaaaagcatacattcaacccaggcaagatgtcagaacttccaactaccaactcaacatctctctgaaaatgcttcagaggacccaacatgtacatatggaactcacgaaacctttccacactttctaattttaatgaatgactttgcagccttccctgtattaagtcaaaattctggaagtcacccttgacagcttcttctcccttactccttataaaaaatccatttccaagcctctagtttttacctcctaatgtatctaaaatctacttagagatagatcatttcctcatataggacaccactgtcccttgcttacctagatttctgcaaaaactaggctacccccatccacatttgcctcctccactctgttcttcactcctctacagttaccatggtgattttttgaaatgcagattttattgccttatttccctgggtaagagtctccgggattcttctgtgccatctctaaactcctctgaatatggcccacaggtctctgcttcatctggacctccctgccactccaacctcatctcataccatgttgctcttatcttcctttggttcatccttcaaacatagaggacaaactgcgtcttctgtctgggatgctcttctcttctgtttccacctatttagatcttttacctcttagatcaatcatcattcccttgaagaagcaccttctgatcttcctgaatagatcaaatccactattagagtctgtactggcatcaggttattaaaatacatattgcaattgtaattttacatttattgctgagtatttctgagagtagggtaggaagaaggagagctgcaagacatgaaacaagagaggacctagggaccagaatatgaagcacttagtaaaccatgttaagacattttggatattatcctgaagacagtggggaaccattttaagaggaaatgacaggatcctattaacatttaaaaaatatagtggttgaattatgtccctccataatttttatgttgaagtatcaatcctgttacctcaggatgtgaacttatttggaaattaggttattgcagatgtaagatgtagtaggatgagtaagattagtaagatgaggtcatactgtagcagagtgagcccctaaaccaataagacttgtgtccttatttttaaaaatatcatgcggaaagatataaattcacacaggaagaatgctatgtgaagactggggttatgtttccacagatcacggaactaccagaagttagcagagaggcctggaatagattcttccctagtaccttcagaggtagcatagttctgccaacacattgatctcaaactatagattccagaactgggagacaatagaatgcagttatttaagccactcagtttctaatactttgttacagcagccctagaaaactgatatagtaaggataattctggctgcagtgtagagaatgttttggaagtgggtaaaactgaatatggtgagacaatttgaggctactaatataagagatgacagcagctgtggaaaagattagagaactaatttgcaagtagaatcaatgaagataggtgaatgattagacttacagagtggagagaagaatggcttgagaaatgatggaggattttaaatcccatttattgagtgatgactcccaaacatacatctttagctaagacttctcttcagtcttccagattcttatatccaaatgccagttaagctacacttggtttttccacagtcgctttgatgaatgtttaaagaaagaaattggtaactaatagttaataagagctaccatatagattacaaaggagaattaatgtattatttatctgaataactgtatgttaaaggaagataaactttcattctacctgggaaagagcttttaatcaaccatagctcccaggaatagaatggaatagaaaacctacccttgtgaggtagacttctgtctctgattacttcatgcagggtctaaatgtccataagtctacaacttcagcctgtttatccttctttttttcattcacatggttctttgtttacagctctcatgttgttctctttacattcaggttatatagaggcctgtgatagtcctcatatgatggtaaggtttctcacagcaaagaccaagctttgttaattttgtcagcatatggtgcctaacactaagctgtatacctaaccagttaataactgctgctttgttgagaatgaaaaagtttaggccccaatttcaaatattttctaccccaactatgttatgcaatatattaatactaaatatgccagtctattttcttgcttagtaataaaaatacaacgtgttgagataaaatatttctggtagctaatcaatattccagttctcaattatccatgctagattatattatgcattaatttgattgcatgctctgcagtatattgtgtatgtgttgtgcaaaggcataattgctcatgttcatacataataagtaggtttgggaatttgtctggaggtatatcttagttattaatagtgattgtcaagtgcacatttcaagtttagaacctcgttggccttctgggagtcagagtctcaatttcaaggaaaatttaaacctttcctttcatgtattcctgttcacttaatcctgtcaaaatagaagattttgtgtctaagaagaaagagctagaggctaattaaaggagtgaaggccagggtttcatggacctctgatttctctccaaatgagtgatgaattaaatgtaaataagtcagaaacataccttaggttttgcttttttttttaattgttataaaaaattaatgtaaaatttagcatcttaaccattcttaagtgtacagttcagtagtatgaagcatatctgcattgttataaaatagatcttcagaagttttttcatcttgcagaactaaaactccatacacattaaacaactccccattcccctgtcccctcatttctctcttggtaactaccattctcctttctgtttttatgaaattgactactttagatgctgcactactgcatggaaccatgcagtactggtttttttggtgactggcttatttcattttatataatgttcttaaggatcattcatgttgtagcatgtgacttgatttccctcctatttcccatataatattccattttacatatataccacattttgtttaaccattcatctgtctataaacatgtgggttgcttccacttcttgactattgtgaatttcttttttaactaagtgtatttgaaaatatacagtttctgtatcggttccattttaaattttctctctatgaagatgaaggaagaatatttttatacacttgaaaacttaaaactctttgtcacttaagccttctgtattagtacattctcatactgctataaagaaatacctgagggccaggcatggtggcttatgcctgtaatcccagcactttgggatgctgaagcaggtggatcacctgaggtcaggggtttgagaccagcctgtccaacttggtgaaatcccatctctactaaatatacaaaaattagcctggcatggtggcacacgactgtaatcccagctactcgggaggctgaagcaggagaatcacttgaacccaggaggtgaaggttgcagtgcgctgagatcacgccactgcactccagcctgggcaacagagtgagactctgtatcaaaaaaaaaaaaaaaaaaagagagaaagaaagatacctgagactgggtaatttataaagaaaagaggtttaattggctctgggttccataggctgtacaggaagcatgacactggcatctgctctgcttctgagaaggccccaggaactttacaataataatggaagacaaaaagggggatccagcacttcacatggccagagcaggaagaagagaggcggaagtgctacacatgtttaaacaaccggatctcttgacaactcactcattatcaccaagacaataccaagggggatggtgttaaactattcaggagaaactgctcccatggtgcaattacctcccaccagaccccatctgcaatatgagggattacagttcgatgtgagatttggtagggacgtagatccaaaccatatcattccacccctggcctcccaaatctcatgtccttttcacattgaaaaatacaaccatcctgtctcaacagtcccccaaagtcttaactcatttcagcattaactcaacagtccgaagtccaaagtctcatctgagacaaggctcatactttctgcctatgagcctgtgaaatcaaaaacaagttacttacttccaagatacaatggggttatagacattgggtaaatactcccattacaaaagggataaattggccaaaacaaagggctacaggccccaggcaagtcctaaacccaacagggcagtcattacattttaaagcttcaaagtaatctcctttgactccatgtctcacatctgggacacactgatgcaaggggtgggcccccaaggccttgggcagctctgtccatgtggctttgcagggttcagcccccatggctgctctcttgggccagtgctgagtgcctgcagcttttccaggtgcagggtgcaagctgtcagtagatctaccattctggggtctggaggacagtggctgtcttctcacagctcctctaggcagtgccccagcagggactctgaacatgggctccaactccacatctctcctccacattgccctggtaaaggttctccatgagggatctgctcctgcaacaggcttcttcctagacatccaggcttttcttttctaccacatggacaggctgcaaattttctaaacttttatgctgtgcttcccttttaaatataagttccagttttaggtaatttctttgctcacacatttgagcataggttgttattaacagctgggccacatatcgtacactttgctgtttagaaatttctcccactagatactgtaaatcatcactctcatgttcaaagttccacagatccctggagcaggggcacaatgcagccaggttctttgctaaggcattgcaaaaatgacatttactccagttcccaataagttcctcatttccatctgagaccttcttggcctggacttcattgttcacatcactatcagcacttttgttgaaaccattcaacaagtctatcggaagttccaaacattccctcatcttcctttcttcttctgagccctccaactgttccaatctctatccattacccagctctaaagttgtttcatattcaggtatctttatagcaatgccccattctgtattaattttatgtattagtcagttcttgtgctactataaagtaatacccgagactgggtaatttataaagaaaataggtttaattgatccacagttctacaggctatgcaggaagcatgatgctggcatctcgtctgcttctggggaggcctcaggaaccttacaatcatggcggaaagcaaaaagggggagttggcacttcacatggctgaagcaggaagaagagagagaggagagaggtgctacacacttttaaacaaccagatctccttagaactcactcattttcaagaaaataccaagggggatggcattaaactattcatgataatcttccctcatgattcagtcacctcccaccagccccacctcccacattagggattacaattcaacatgagatttattggaaatacagacccaaagcaccttagcttcttattgtagattgttattctctgataaaaactggtaccaaatatttttagacagaataatattatgaaagtcagtacaaggaacgtataaaactctgaaaacagatattagatttgtttggcagattggtgaataggcaatggaagtgaatgactctttatctcctgaaggaccaaggaggctttgaagagaattactaagacacactcataccttttaaaaagtaactcttggtcaggcgcggtggctcatgcctataatcccagcactttgggaggctgaggtgggtggatcacctgaagtcaggagtttgagactagcctggccaacatggcaaaaaccccatctctactttaaaaaatacaaaagttagcagggtgtggtggcaggtgcctgtaatcccagctactcgagaggctgaggtagaagagtcacttgaacccaggaggtggaggttgcagtgagccgagatggtggcactgcactccagcctgggtgacagagcgagactccacctaaataaaataaaataaataaaataaaaaataattcttcaaaattcaatattttccaaacttattagaatctacaaggaactcaacaagaaaaaaaaacctcattaaaaagcaggcaaaagacatgaaaagacatttctcaaaagaagacatacaagtggccaagaaacatatgaaaaaatgctcaatatcactaattatgagagaaatgtaaactaaaaccacaatgaaatatcatttcataccagtcagaatgactgttaaaaagtcggaaaatgacaaatgttggaagatgtagataaaaagatatgcttatacactattggtgggaatgcaacttagttcaggcactatggaaagcaatttggagacttctcaaagaactaaaaatagcactaccatttgacccagcaatcccactattgggtatacagccaaaagaaaagaaattatatttaaaaaacacctgcattcatatatttatcacagcaccattcacaatagcaaagtcatgaaaacaacctaagtgttcatcaatagtggattggataaagaaaatgtggtacatatataccatggaatactacgcagccatagacaaaaaatgaaaccatgtactttgcagtaacatggatggagctggaggccattatcctaagtgaaatagttcagaaactgaaaatcaaatactgtgtattcttccttataagtgggagctaaacagtgggtacccatggacatatagaaggaaataatagacactggggactccaaaaggtggaaagtggttgggtgtgagggttgaaaaactacctcttgggtacagtgttcactatttgagtgatgggtacacaagaaacccaaactccaacattatgcaatatatccatgtaacaaacctgcacgtttacttcctgaatctaaaataaaataatatttcaaatttaacttcttttccacctttattaaaggtaaagctattacttttgttttaacactatagtgaatagaattttctgtgttgttttaaataattccgtgatctaagtatctgatgcagagatctttaccaatgaacatcaatggtttttccacaaaattaagatcttttctaagatgaatttacaagggctttgagtgtgtatgtaaaaataagtcctagaattcttttacaataatgacaagcatggcctttcaatttttcaacattctgaaaattgataaacaaagtcatttaccctgtctctaattttctgaagattagattcattagtttaactcatggttatagtttttgtgtcaaccgtattgatgtatacatcaataaacacaatctttcactttcactcactcttctgtctcctccatctccttccagttcctacattattcagaatccttggcaattcatatgtgttaggtgtgaagatatggaattgtcagcatcaggaaaagctattaccttgctacttcagactgagtctttctcttttctttgtttactttagatgatttcttttttttaaagactgagttcttgaattcttattctctgacttgcttcataatccatttcagaatttcttgctcctacactttgtttctttatgaatcagtctgtgcatgagatattccatttttaacccagcttaaatttctccaatgtacccttgttttgctttcaagacagttagcaactctgaattcaagcctatgatcttcttttagaaacctgatctgactgactcctgcaaaattctaccttttttcctggctcttaatttagctttgaaaatgaagtacatactatttatctggttatacattttaaagtagattctaagtgcaaaaaatgtgcctagtcaattcaagttgactcctgattttttgaaaaaacattaagaattgaataacaagaataagaataaatataaggctactgactgaaatgtgatctttctcttattttgaacatcttatttcacaaagttctaagtccttttctatttggcttgaccgcttccatatgatcatggatataaaacgattaaacagaaagttcacattcagcaaatatcaaggtgttcttaatatcgtaacttgaaatcaatgaagaagtcacattttctgctttgtaaaaactgcctcacatgtccctggtctggcaaaaaatacacacacaagtactgaaaacagaagatgatagcaccagctaaatagcaccattgctaggcataagatttgaaagccagcactttgcagggaaaatttgagtaaacaacctctgtggaaatacagttaattaaatctcgattctataaactgtgaaccaaagtttatataaaagagagactaagaagtctttgttgtaagtattaaaaattctgacataaggaagtgaccactctagccatatcagtgtcagaaaatgacagtgtggggctccaaggctgagaatcagtggggctgcaaaatctggacaaagaaaggcagaacaagacatagactacagaaaagagaacattatctgagcaataccaggctaatcccttggtgtgaagaaaataggagttaataccaaaaacatatggctcattattcatgtaattatgcttgcaagctatatagtaaactatatgtgaaattttcataccatagtataaattcagtcattagtttttccttttcatatatacattaagtaaatatgtattgaggaccctcagatgtctcaggcatggacctataatggtgaaggattcagctttgccctcaaggatcttacaggaatggggcagatggcaaggaaagaaacaataccgtgtggtaagcacagggcactaggggaacaggaagtagtgatctatttatctggatccttgtgggcagaggaaataaacataactaagaacaatgaatgataagtttacaggagggtaggggagaagattccaagtagaagcatcgtactaaattttgagtggggcaaaagttcagtgaaacttttatttttattataaacccaccaaagtaaaagttctcagcttacatattatagatagctctctgaactggatgaatgtcagctgtgatttcaatcaagcaatgatgatatggccagatggagtgtgccacctcccttcagcattttgtcttaagagggtttctaatatggcttgtcagacagtatgtgtattccgtgtgttgctggaaatttgaagctaccgtctagaaacaaaggtcttggtctcagcagcattcagtgagttggtgccccccagtaccttggataaaaaaatgtatcctataaagggctccatgaagcacaaatgtaaaaacatgctacaaaagcatctcttcttttcattgtgccacaggggctatcactgtgagtctgacttgcaaagtgcacagcaaagcgaacctgtggtctcactactttgctttatactattgcccactccagcacctgcataaggctgaaggatatccaccaagagaatgctcatcactttgccaactgccctctgtgctctagcccagggtgggcattttttttttctgtgaagaccagctggcaaatattctaggtttcatgtaccttacagtctctgtgacagctaatcaactctgccgtcgtagagaaaaccagcacaaaaccatctataggcaatagacaaatgaatgaatgtggctgtgtttcaatcaaactaaatttgcagaaacatgcagtggtcccaggccatagtttgctgatccctgctctcaacaatcctttaaggtgtggtatctggatcctagcatatgctgtttctgtttcatgaaacattcctccttcatctctctgcctagctagattttagtaattcttcagctattagcagaggttattttttgagggcagatgcctcactgatgccccaaatctgatggtatgccacttcctctccagagtactgactgatttctggttgtctggagacttgctctctgcacttcagagtatgagcttcctaagggtagaaatctgcttccctttctgcctgctgaatccctggcacctaacacacaatgcctgggacatagaagtgactaaatacatatttgtttaatgcttaacaaatgaaattacttacatcttccttactttgttaggatcataattctagcaggtgaaattatttatggtcttatagtttatgagccatgtcaccatgttatcacattgtaacaaagcaaaggtttaactatatctcggctccagtggcattcagagggctgtggaaatcaatagttttagcttcatttagctaagtggagaatgccatttgggcagtctgtgtctactaacaacttggtccacacccactgctctgctgtctcgaggtggagaataacacctctctgtccccatcagtgtcttccactctttttagaagtactgccagcacaatgctgtctatgctccaatgcttaacaaaatttttagtgaaatgttgcttacctttttgatatatcttattatcatcctagagcccagagaagtgcattagattaacatggaatcagaatccgatgtaaccagaataacttccctccaccaagactaatgctttgttactgggtctaaaatgttgggctcagttcttgggaagacttacttcccaggaagctcctctgtgtctcttaggctcacacttcaaggaggctgctcattaatttttcaacatgctcaggtatcactgtgaatcctggccagagcaagctggtaccttgactactcttttttcctcttccacttgcaggtagaacaacaactaataacaaatgtatatatgtagctcactatgtgccaggtattcaccatctgtaagtgatttaccagtagtaacttaattgaaccttgtggtgattctattgcattatctttatttcaccaaggaagaagctgaggcacagagatgttagttacattgcctaaagtcacacagctagtaatgatggagctaggaatataactcagacactctggttctgagtaaatgccctaaacccatgctgctggtgctgtgatagctgagtctcagcctcttcctttctcctacccctaaagaatatacagtcttcattctacccacttctctctcagaatctcagaaactaggaaaaaaggaggggtagaaaacacataacagtgcataacttatggtacagactgagacttgaggggaaatattcagagaccactttagatattaggcaatgctagctctataataagtagaaaattccaaattcaagatattctgagccttgaaaatcatgagggaaataaaaatgcccttgaatggctatgctgctttctctattcaaagagctagcttggaacactaaaaggatgttcttattcactaagtgtttttcactgtttgagtctgcagtggagttttagccacaaataaatgtttttcctaaaattgaaatcaatttgtaaaataatgtagaaaatataaagcctcttgctgtttttctcagtgataaagcagcaggaccgcagcaggaaccaaccatgaaaaatgtggccacctcgttgagctttgcactaggaagctacttcattttcacatacaaggattctccctattccgtgttgcaaataaaaattagtaaattagtagtactaagtttaatgaactctactgaactctgtgtgatacaggaactgacaactatgggtctgaagatattacatccctgttgctttgtgaaaattatctttactccagacttgatagaattagcgtaaacagataactcatccatctttcaatttaaagaccttccttttcctcccatctttttccttttcatcttcaatggttaattctcatttgaaaggatcattcccttcatagacatatccccggactaaaacatgctctttctaacctaaagaaatggtttcttcataaactcataggcattaacatatttttgtaaggtcaccaagagtgacttgttcggggtacctgaaagtcaatatggcgataaactgaagaatcagatttttcttcctgatttttctaagattattgtgggtaagatgaaccatcactttttgggccctagaaactgatttatatagagactagaaaatgttttacatagagaaactaatttatatgcagattagaaaatgtttttggagtttattttcccactagtaaagccaatttttttctgtgtaatgaatccattcacctacccatctacccatcagtctacccattcacatgtccatccatccatccattcatccatccatccatccacccacccagtccaatctataattctaaccatcttgaccctttttatattgcttctctgcttcatttttatctttgcccttgtcatcttttactatttgacacaagttttttatttcatttattgtctgcctcacactttagaatgtaaattccattaagtcagaaattccagtccattttgttcatggtgtatccccagcacctagaacaatacttgacaataaatgataataaatgtgagaaatgttgcaagaatttttattaaatatttatttagcatttactacttttaaagcactggattgagtgccaaaaaggatctaagatgaagcagatatgggtctcactgtcaaggaattccaggccaagaaagctatcaccaaaatatattattttaatggcatcattatatagggggcaaagttgttttcatgagaaaaatgaagcatatgtggtatttatactgtgcctgagtgaaaggcttccccaaggaagtgacacatgacattgaataaggggaagtatttgaaaaccgagagttgtagtggaagggcatcctagaaaaaagtgacaactggaattaacaagtggaagtggaaaatgcaggatatgttggagacagaaaagcaattggttcagtttagaggaagcctagaggccagaaagatactaatggagaagatctatttggaaagagtggttgggtcagattatggaggattttgatgtcacctgttggcagtagcgagtccgagattctctcgtatctgaacctctctgtctcccctatattataacttttgaatgacaatattttatgcttcctattctggtttccaaagcagcaatgtggccatcccagtttgctagagcctggaaggattcttgtatgaaatgcaaatttagtctttgatctacattttgtaggtcaacaacctcagtttcgtggtggtaattacagggctcacaaggatgttgttcttgagtaatgaatctaatatattagtcacaaacagtaagcatctcacttcccctactcctccttttggttaaggagcacaaattgtccccagttctttgagatttcttccgggttcatctggagcatggatttctacctttgcaaacatttaacttgcagccctagagctgtgtaataacagatagtattttctactcctagccttatctggggagaacacacacaaaaaagtgttttttattttggcatgtgagactatcgagtgtgtccttgttccataagtgtactttggcaccaggaagcagagacagcagctttcaagtgatgggagaaacagactgattaagagctctgcctgggcagacggtactgaaactgggtgtgtagtccttgcctcatcatttcagtttttttaatgtaaatttttatttttgattgaaaaataataatgtatgtatttatggggtacaatgtaatgttttattatacacagacatgcacacacacgcgcacacacacacattgtattgcagtattattcacaatcgccaaaacagtttgggggttttcatgaaaaaaattccaattttgggtctgttagtatattttatcatttcccccattctcaattctttttcctctaaattcctttccctctcagttaatgccaccactgtcctatctttccatatacccagaattaaaacttcagtgtcaatgggaaaaactggtcataacatcatctattttaattaaatttaaataatttatttacttaaaaaatcaagatgaaaatacctaatttaaattaccactgaaggctagcattcatttccatggcatggccatttatttgttctttgacttcatcttctcctattattttcactcctatccattgaataaattctgaaatgggaatagtatcaaatgggagtgttacttccacactttgctgggtggagcaaacctatctcctcacaaaagggatagaagtcagtttgcagtgacttccctgatcctaccagccagacatgctccttgcctctcttcttgcctcctcctttaatatttaaaatattttttttaattttatttatttatttactttttgtagagatagggtcttgctatgttggccaggctggtctctaagtcctgggctcaagtgatcctcctgcttcaacctcccaaagtgctgggattataggcgtgagccacggtgcctggcttctgcctttttgtgataacagatggtaacaggaatgacaccacacttatttgtaccactgtcatggctctaatgattatggctttgaagtagcatcatttgtttaaagagctcaggttggtggcccagcaaactcgggttcaaattatgcctctagtgctgacttaatgacatggggcatgtcgcttgaccttgctgggcctgttttctcatctgtaagatggagattacaaaaactttcaaggtccttgtgggaagtaaacaagttaatatatgtaaggcacatgcacatagcctgggacctggtaaataggtgccaagggtagttattactgtggttgttattgttagagtttttgttttacttgtgctaaaaatagaagattcccaaggacagaagcttcgtcttctacaccttgaagggtagtgtttttaataagcaaaggtgagtgtgtgaggtgtcaggtatgagcactgagctgtggaggctttcttgatcttttgctttgtattttaatagatttcttcttccagtatcctgcctcctggtaatgagaaaggggataaggtaacttacacataaatttggttcaggtacatcattttttgtccctagatcatagatatctatttgcaaggatgcaatctgtgatagctaaatgtttgctttgttttataaaatcaagctaagagaaataaatgttaggtttcacataaaaaaagtccttttcagaaagagggtgctgtaagtatttccattctctcaaagcattctagagacagaaaaagtgttttctaaccccttcccacccccaccattcttttcttttggtgcctggtgaagagtacattaaaataggaaggaacattccagagtgctcaattgcctctgttcagggtccacagctgaatttctaagttctttctcctgtggtttatgcagcctatactttgactacttctagttagacagaaggaaagctcacacattttgcagtgagccaaggtaaaagagaactcttttgtcaaagtaataataacacttagcacttatatagggctttttatcttcaaaaggccttgcaaacattagctaattaagaagtctgctcaatgtgcagcagctgttgaaaaaataaatgtgatgcttgggtgtattaaaaagaagaacgaaaacatgaggacatcctatatcaagcagctgttgtactccgtctaatttgtttgcttcacctggtggaatacatcagacgctaaaatagtcctgccccatagagtaataatggttagggatgaggcagagcttgtacataatggaatattgcaagggctactggatatttaccggaagaggaaaaaccaaagaaaagctgcatcgcctaatttttattacacttttataatcatgggctcatgcagcactaatgaaacagacatctgacatgtctaatgacatgaacatatcgtagattctttaagaagaacctatttgcaagagcaagcattctcatttattcattcaaatttactaccaaatatgtattgagtacttaccagacactggagacatgcatttataaattacttggggacagttttgaaacagctgtggctctatcatcttacatgttatttacctattgtaccttaattttacattaatattgacacacatccacccagacccatattaaattcaatcaacatttttattcgttgattctttggcagaaatgagctaatacaccattgcaagagctgagctattattttggtgatgaaaacaaaatttagaaataaccaaaaaatgttttttttgtggttttctgcaatgggcatttggatatggtcctcttttctttttcttggtttttataacaacagtcattgagctatacctgctgttctgttttaaatacctgtttcaagaggttgcaaattccaaaaccttgcaaatttcaagaggttccaaattccaaaggaggtggtacatgaagagaaaagggacagagatcatataatgtcaaaatgtaagtgcctgcatcccattagagtataccccatgttatttatcaaagtttacacacatgcaaggcgtattagaataccttacttccattgtacagaaggagatgggggaattatactttggattgagttgattgttaaaatggggttgtaagaaaaattatttcctcattcaaggaggacaaattataaaagagatagcaaggaagtgaataaagaagagaaggtgttctaggtattgggaaaaaattgaaacagaaaatgttcctagacaggagaaaaatgtctgaaggaattagaaataggtttatttttgctaaggaaaagttacaagccaccaaataaagtaaagtagcaaggagaagccaagtcatgcaaagccaaggccatagttacaaagataaaaaagcatctacttgtcatttcccaagttcagaggatggaacagcgtgaagtgactagaagcccaggaccaacggttgattttcaaaggtaaatggttggggaggggttgactcggttagaaaaaaagtcaatttcagtgatcacaggctcatcctggagcattgcttacagtaggaaatatttggaaataaatcaaatgtctattttttgttcgatcatatttttctgagaagaaaggattgattaaataaatgaggatttattcataaaatggaatactatgcagctattaaaacaaggaagctctgtcactactcaaagctcaaatataagttgataaagcaaggtaggggaaagtgtgcatagtgttaaaacttgtgtgaaaaatatagatccaaatgtgtgagtgcattcatgcatatttatatatgaagagactatagactaactctggaaggacatgtatgaaaatactacagtggttacccctagtgaagggaatggagaaattggaagactaggtagatgctagactcttactttttagtgtatatttcctccttctcccctaaacctttttttttttaaaaaaaagaaaacattttattatgagataattatagattcacatgcagttgtaagaaataatacaaagagatcccatatatctttcatccagttttctccaatgataacatcttatgtgaggagtttaatgtcacaattagaaagttgacattaatataatccactgaccttattcatatttcaccaattttacatgcctttgtgtatttgcatgtgtgtgcatgtttaatgctatataattttatcacatgtgtaagttagtgtaaccaataccacagtcaagatacagaacagttctatcacaaggatatctcatgctacccctttatggccacagacagctccctccttctctcccctccttactcctggcaaccactaatctgttctccaaagccataattttgccattttaagaacgttgtataaatggaatcatgtagtatgtaaccttttgagataggatttttatattcagcataattcccttgagagttatccaagttgttgggtgtatcaattcttatgaagggcatgttgttggattgttgtttttatccactctgcactccacaaatctgatttttaattagtgtatttagaccatttatatgtgaagtaattattgatatgctagggcttaaatttgccatttaattgtttgttttctgttcgtttccaccatttctcatgtttctgtttgtcttttcttatcttcctccgggttacttgaacattttttggatttcatgtttatatatttacagtgattttgagtctatcattttgaatagttctcttagtggttactctaggtattataatatacatatataaagtagtaatatctatgtgaattatattccttttttaccttttgggctactttgtcttacctacaagttaaatttaaaaataaataaaactagcaaaccaaaacactcctacatgtatacctacttaaaacaaataaaactcacctctgtacagaaagattgtagacaagaaaagaagtgaaaaccaaagcacttcagaagtcatgcaaagaaatcttgaataagaagaaaggattaaaccaaaacttttagggcatgactgagaaattgaaaactgggggctgtccaggacattagaagcctggagcagagaaagccatgttattgagtatgtaagtttgttctcacattgctgtaaagaactacctgagactgggtaatttatgaagaaagaaggtttaattgactaatggttccacaggctctacaggaagcatggttgggagacctcaggaaacttacaactgtggtgggagggcaaaggggaagcaagcacatcttcacagggcagagagagagagagagagagaaggggaaagtgctacatacttccaaataaccaaatcttgtgagaactgtaccatgagaacagcaagggggaagtttgcctccaatagttaaatcagctcccaccaggtcccccctccaaccctgggaattataattcaaaatgagatttgagtggggacacagagccaaactatatcattgagtatccaggccttgtttttttatgacctactgcttaccacctggtagacctcatttcatttcttaaactctttaggtttcaaatataaaaggaagttaataatggaacctacctcgtagaattgttgtgaagattctcaacatgtatgtaaagttcttagtgtcatgtctgacacatagacaaactcaagtaattgcaatcatataactgaaccttttcttgagtgtctactggggtcgcaggggttgcaggttacaatgatatggtgccattcctcagaatgagaagatagtgccccagacatgtttatagaccctttgatacttccctcgttggatgaaaccctcttttcagtttctttccactaaggatagatttcagcatatcactatgcttgaagtaaaaagagcttactccaggcctcttggctcttgtccctaccttagactgatggccttggtatttggtatgtgaagtagcagtttggatatggagtacaaagagtgaaaaaaaggttggatatggatttttagactcttactttgggaggatgagaaaaagttctcagaattgataacattgtccctagtagtaagaaatatcatttttcctgtctttctaggcatccttgttgatagatctttggatagaattttttgcagagaatggatgatgtttactttttttatatgtaaatgattctaaaagttgcttttttaaggctgagcacggtagctcacgcctggaatcccagcactttgggaggccaaggtgggcagatcacctgaggccaggagtttgagaccagcctgaccaatatgaggaaatgccgtctctaataaatatacaaaaattagctgagcatggtggcatgcgcctgtaatcccagctactcaggaggctgagacaggagaatcgcttgaacccaggaggcagaggttgcagtgagtggagatcacaccactgcactccagcctgggcaagaagaacgaaattccttcccccccccaaaaaaaaaaattaaaaatttgctttttttagtgtttttgtacaaaggatcatcgtggtatgatggcgcttcacacatgcagaatggtcatcttaggctattgtaaccatgtagagagcaattccttagggtggtgtttttttgttgttttttatttccttcattcccaacttttatggtgtagagctctggctccatttcaaatcagcggaaaaattatcatcagacctaagaatgttttcttttgagatggcgtctcactctgtcgcccaggctggagtgcagtggcgcgatcttggctcactgcaacctctgccgcccgagcggcaagtgattctcctgcctcagcctcccaagtagctgggactacaggtgcctgccaccacggccggctaattttttgtatttttgtaaagatggggcttcaccgtgttagccaggatggtctccatctcctgacctcgtgatccacctgcctcggcctcccaaagtgctgggattacaggcgtgagccaccgggctcggccaagaatgttttatatttcctagtttctcttccttttgtggatcctaatcttttgtttaacaattgatttctacttcattttgactatatattttcttttcaagcctttttctccctgcatcttgccaatatccctaaccccattcactctcggcaaactcgcctaaatctcccaccatgaattttagtcccaggttagacttttaacctcatctcccattgaacaaactgcaaaaaatattaatacaaagggcagtttagagtcaacaaaaattgagaacacttgcagctgatggtaccatctgtgcctgtcaaactctggccaagtagttttccatggtggagaaagagagaatctcatgacggcttttggtttggggttattgagaactgagcctgcactggaggaagactagaagagctgggaggcagctctttctctttgtggtgtgtggctcatctcccagaaaaacaggcctctcccagaaagtggtcaaatttggcatctgagacctgagagtggcctcctgtgggtcctttctctcctagcccatctgcgaaaatcaatctgtgccaggtgctccacatggcagaggggagtggtggagtcatgaaaaagaattaagcaaacaaacaaacaagcctcacagagcacacaagaaatttctgaagagaagtttcccaggcttttgatgaggcgaaacaggaggaccatagagcagcagaggaagaggaagggggaggatatggaggttacctgatggcctaattggttccgacaatgcactcctttgttgcagagaatctgaatcatggaagaagcaaataaataaagaaaaacatatggcagctaagtcatatcaatctacattaagaaaaataaatgagaggatattagggagaagatcctgagaggagaaaggcagatggggactcttagaaagtattcttaaaatgggcaggaaatgtgaaaagggactttaaaaagaggattgtgggatgagcaatgaataagtaaaagggtacttaacctcatcactcatcagggtagtgcaaattaaaaccacaatgagataaaaatactaccagaataactaaacaaaaaatgatggatcaaaccaagtgttggccaggatatgcaggaattgaactgtatgacagtgccggtgtgagtgtaattagtgcaacccctgtggtaaactatttattgctattgttagaattgaacatatgcatatcctacatcatggcaatgctatttctaggtgtatacccaggcacaatgagaacatatgaccactgagcatcatgtacataaatgtttatagcagctttattcacaatagccatatttgaaaataataaaaatgtccaccaacagtagaatagataaatatattgtatatgtcatggaacactatgtagcctgaaatgaatgaaatgagaaagaatgaaatgtggatgcgtctcacaaagataataacagaaaaaaatcagatgacctggatgacaaagaagcatagtgtttggggtgttacatgtatttagcacattatggagaaaatagagtgataacttgagttctagtgagctccaaagggatggaatgatatgtaaaaatcaccagaaatttgtttaagccatactgaacctttctataatgagacctaaatagaataaggtactgggtaatgaatgtttcccaaattatggcatgaatgtttaaggactatttcattttaagagatgcagtgtccagaaattgtcaccatggtagtagtttttaaaatgtgttcctcagagctgattggctccaggagtgtgtaactcaggagtgtcatctaccatctgtttatctatctagttaactatctattgtagagacggttgtggtggagtaaaccaaacaggcagcttgggattcatttgttggggatctgcacaagatattgttagaaaatagtttgggctgctaaaaaaaaaaaaaaaaaagaaaaaaaaaagaccacttctttagagaactgttagtgtgatgataagagattatagggcaccaggaaaatctagcaaatacagccatctaaccaaaaggcagtattaccatccttgctttgccaggggcaagtgttgatatagacaacatttggaatttggagtctggagtgaggactcctcggaatatgacacttaaagaagcccctgataaaatctagctaataggtagcaataataatattagtaaacatttattgaatatttactattatttagtgatgtctgctatttttatacatcatttaatcttcacaagagcacagaccttgtagtcatgaagtagctgctctcaggctcaccctcccaccaagaagctgaataaattactgtttgtaggaatcagagtacaccaaaatgggctagcatttgaaagatcaagaattctcaaagaaggaaatgcattgaggtgaatgggacctctgtgggttgtttcctgtgatgcatatgcaatacttagaagaggcatagtagcctagatcttacaggaattgcagtgggactggtagatgaaaattcatgttcagggataataagacagccacaatatgagggaccaagattctggagagaaggaaccacagagatctgagccagaattctgcacgtgactttccctgaggaatttgcagatttctacaccacactagcagtgagatactgagaagccaagaagaatgcagtagtttaaaaggccaaaaatctaagcagaaatgtaagcaatcccagagaactgaagagacagaaattgtagttcagagcctcccaagcaagaaggatctttataaacatggcagattctcaattgagaatctgaagagctagattctaatagtatgggcaaactgaacatagaccattctctagtggatcaagataacctgtgtatgttctgtcttccagaaaaaagtggaatcctctatgtaggatttcagggtctaaataattattttacttaccatgtatgataggcaatagaacattaccaggcatgtcaggaaatatagccaaataaatgaatttcttagtgaaaacaaataaactgtaggttattgatatattgggattatcagacagatttcaatacaactatgattaatatgtgtaagaaaatagatatcagattgattatttcacaactggaatctgtagacaagaatacaggggaaattctagaagtgaaaaacttaagaatctaagagatatgtttaatagcagattatgcatagtagaagagttgattagtaaagctgaaaatgtttataaaaataacggatcaaagcatcaagattaaaaaggtgaaagataaagaaaagagcatagcagacacccagtgaaaaatggtgcttctcaaagtatggtcctgagaccacttctggtgctggtccctgacaacatagagtgttcataaatgtttatagcaattgattttgccacaacattttaatagcatattttatgacaaaattagactctaagggattataaataaaaaggaaaaatattaatcacgactagtttcagaaacattggtataacataagtatgttggagtcccagaaatggggaagagaaagaataaggcagaagtaacatttgaatctctattggctaagaatctttcaaaactgataaagcctcaacacacaacttcaaaaggcttcatggaccctaagcagcataactacaaataaaaacttacctaggtacgttagaacgaaactgctgaaaacctaagaagaagaaaagaaaatcttaaagtctgtcagaaaacaaaacaaaaaaaaccaatcttcaaaggaactgtagttcctgaagctgctgccttttcaatggaaatggtctagaatccagaagtcgatgaagtggcatcttcaaagtactgaaaggaagtaaccaccaacttaattctatatcaagtgaaaatatctttcaaaataaaaataaaatatttgtggataaacaaaagcaggtaatttgtaaacagcaaacccacattaaaatattatttatctatttatttattttttttaaagttgtagagacagagtcttgttctgtcacccagtctagagtgcagtggtatgaccaaagctcactgcagccttgaattcctggactcaggcgatccttctacttcagactcctaagtagctaggattactgttgcatgccactatgcctggctaattaatttttttttttttttttgtagaggcagggtctctctatattgcccaggctggtcttgacgggctcaaacaatcctctgacctcagcctcccaaagtgctgagatttaccggcattagtcactgcaattggcccccacactaaaatattgaaagaagctgctcaggcaaaagaacatgatcccagatggaagtacagaaatgaaagaagcaatgaagagtaagagaaaggtttaatataaaggagcatatagataaatgttgtgcaaaacaagtaataatgtctagtaagattaaaatactatgcattaatagccaaaaatgcaggagcagggtaaactattaaaatgttgtaaggctcttgcaatgtttcagaacttatgaaggcatacattatattatattctagtaagccaagaattaataatgcaattttaggatgattactaaaaagaataacaaaagaatttagatgtaacaaactaagagataataaatgggaaattttcttaagtacttgataaattttttaaaagccaggagaaaaatataggaccaaagaacaaatgaaatagagaacaactgtgaatgtgttagatttaaattcaaatatgtctgtatttacattaaatataaatggcctaaacattctcattaaatgacatattgcttaactatgtaaaaaataattttaggctacataaagagacatactcttaaatatcaggcacagaaaggttaaaaataaaataatggaaaaagatatactgtgcaaacaccaatgataaagaagctaatacagctgtactgatattaggcattatagattttaaggaaggaaatcatgttaaaaataaaagatgccatgacatagtgacaaaatgggcaatttgacaggaatatttaatgatccgaaaagatatgcatttagtagcacaaaatatttaaagcaaaaactaacgaaactaagaagagaagtagataatctgacaatcatagttggtggttttaatacccttttccttctttaactatcagcattagccaacaaaactatgagtgaagatttagtagatttgaataacacaattaacaaacttgatctaaatgacatatagaactctacatccaaaagctacagaatgcatttttttcaagtaaacataacacctttaaccaaattaatcacatactggtcaataatgcaagtctttaaaaaattcaatgagttgaaatcacacagaatatttcctctgatcagagtggaaataagccataaattaataacaaaaagataatgagaacatacacttaatgctgtgacccagtaattccattcctagatacctcacattcatgggtacatttggcatgaaaggaagtatacaatcatgttcatgcaaatcaaaaataaccctgtgctcattaacagtggaatgaaaaaattatatgtcaaaatgatacatcatatattcatataatgaaatagtgaatgagctagtggtatgcacagcatgcatgaatcttgcagatacaatggtaagcaaacaaagccagatgcagagaatgcataccataatatttcatttatataagccaaaacaggtaaaattaagcgatagtgatacaagttggaatagtgttctgttttccttgtgtacttgttatacttcattaacacatgtttaaaaaaaacccaaaaatatcgcaagataaaaaatgcagaagcattttctgggtaaagaaagatgggcaaacattacaaacagaaggaaatttggggggttcaaattctgtatcagtcatgagacttctttcctccaaaaaacttacttttgaacttttaaannnnnnnnnnnnnnnnnnnncttttaaactctattaacattcttatctattatttattatggaactagatataaccacttatagtaattgtctcaaatctgatttctttccatctatattacatgtagggtagtacgatgtagtggttaaggacacaactctagagagagactgaggttaaatcccagttcaaacatttgggcaagtcacttaaactctctgcatctcagtttcttcactgtaatgtagaggtaatagcaatatctatgtcagagtgctgttttgagaattaaaagaatcaatataattagttacaacagtatctggcacaaaagtaagcactccataaatatgtgtgattgctactataattaccttggaggatcggatcattccttatatttgttttaaatccctcgaatacctagaactatacaagcaatcaggaagatgggctttctggacagcgagaagggaagatattttggaaactgactctgttttctctctgtgggtgaggatgagcttacattgatgacaagtttggcttatgaactaggaccttaagtagagctgcataaattagtgtaagtgttattaataagatgggaagaatttgctttctcagttctggcaggaatttatgaccctgagagtcactttatgaccctgagtttgccataatcagcttagtgttctgataggaaaccaaatggtaaatgccaagacgctggggcattggtctcttgtctgcatagtcaccttactttcactaggatctttattcatgttctttatttaagttgggaacttctagcaaggttatgtgtgtgtcatctacagatatgtaagcaacctggactctgaaagcctatatattaaaaaaaaaaagtttatggattgaattgaattgaatcatactgacttgaactggagtgaatcttgagagatggctaagaaccaggaaggcttagtggcttaacttgtaaggctatgagtttgattcactagatatgtaaattttcacaagacacttaacttttcaggcccttagcttactcctttgtaatttgtggctaataatcataggaaccccacagggttgttgtaagaactaaatgaaaaatgtgcctggtacatgtattaagcattcagtaaattatagcaattgctattattgcggttgctatttttatttctcagccaagaggctcaagccagggtgaactgaattgtgaagctgcaagcttttcaaatgtgctccttccttattttaaaatcctttttgtttttattctcctgacaaccctgagagcttggacagggtaggggctattatctacaggtggcatttgagataataacatagagagataaagtgatttgcctaatgatctcataactgtgggtgttagagttaaacctagaccccaacattccctagagccagccttgagatttttattaattcctgctctatctacctgcttatctcctgataaccagcaagagatttttcttcatctctgtgtagaagatttctgaaagaggagtattatccaaattaccagcaaaagaaaatcttatcttttcagatatgatagatggctgacatagatcagtagaggtttttaggagttctaagaagttaaacatggaagttttattttagggcctggcatcctcacttacccatactgggactcattttacccttaacctctctccagcatggtatttcatcttactgcattcttcttgctttatagtgggctttttccagttctctgcctaacttaatgaagaagattatctcaaagttcccaagattgttacttctcatttcaagctaccaggagagactcagcaataaatttttatattggggattcagtttccttgagaaatctttaagtcaataaccaaaccctttaaatttccttaacaatggtgactgtagggctgtgggaggtgttcttttaccttccctctcggcactaaatgtaagctccctgaggacagggactttgtctatcttcctgcaaaattcctcaggggacagtacagtgcctggcacatagtaagtgctccttacatatttgccaaatgaagggatgatgtcccaactccaaaatttgttatattttaattaatttcatatctttgttatcttttgctatatggatagatttttagcttagattctgtttagatgctttttggtttgattctggtttgggcagcttgagaaggctgtagaattttttcgtgttctagttagattttaaatttcctagctcctcagtagagttttctgcctctcccttggcccaagtatttaagtccccaaatttacttgcttttgaagactggattttgaatgtaaataaatgaaaaataattattttgtcttaataataataattaaattatagcactaagtaatttaggaaattttagatataggtagggtattctgttgactgaggtcataggatattcttaaaattggttttttgatctgagatacagcattctattcttgccaggtcatataaaatagaatttgctactattacttgtatttgatttcccctgataggctattcagctaggccagccttctatgactgaaaaaaaatctttaacaaacaaagctgacaaaacaaagtagtaaactagcctgctttgggtttcaaggtgagtctccggtggactctggagcagaaatcctaagtttcttctgactccttggcctgtctgatgccataagagggtgcagggggagatttgctctgcttctcttctgtgtcaaggcagactgagaagcttttaatccactatatttcaaacagttgcaagtaaaaaaaaaaatgtcatgggaatacccagatgtgggcagataataaccctactttttactcccacttattaatccataagaaggaagggggtgagaaatagtctttggacggtcagctatccatgtacagtagttggatgctgagcccttttcaaatgtactcagaataaaagtgaaaccctactacttgttttgcccattagatagcattatctccatggaacgccaattcatatctctttgtgctgtgtgtggttctcacatatgggattttaataacctccatgctgtgctatgaatttataagcagagctgatagaggaaaagcaccacaggactttattttttcattattactcttttgaaaaacagggtctgcctcatttctgtaaggttctcacagtactggcaatgttgcagccagaggtatagttgttactatggaaaggactaagctctttatttatttgctatctatttttttccagactccctttcccactgctgtcctgcctttagccacctccgtaatatccactggcattgtacttgaagcttcagtgaactgattgcaaggaaataggctccatttgttctctagctctgtggtttatcttacattctgaatgttttttctgcccatccttttaaatgtggtcacatttctcctctgtataattctgcaggtccaagtatcttatttagtgcagtggctaagacaacaggctctgtagtcaactagtcatggatgtgcatgctgacattgctctctgatccttgagaaattatttgagttttgtaaattcatctatatgatggtaatgataaaccttcctcctaaggttggtgtggttgttagttggtatggtgtggttgttagttggtatatttctttttttttttttttttttttttttttgagacagagtccccctcagtaacctaggctggagtgcaatgatcttggctcactgcaacctgcattctgtaaaagggactaaaggggaggatttaccctaagcttgattgagtgttcaggaaaatacttctttgagaagctgagctctgggctaggtcctgcatgatgaaaaggtatctgcaaaatgggaggatgagcagaagacaaagaatttcaggaaaaagacagaatagtctcagtcctgaggctgagacaagaacatggcatggttgagaaatgtaaagaaattaagtgtggaggctgaccatgactgagatggccagagtccagggcacctggagccacatgaagagttttgaagtttattcaacatggaacagaagccttgttgatttgggggttaacacaagtagtgaagcagtttcctccaggtttcttctaccaaggaatgccagagagcagtgtcttgctttgtgtgagtagtgttttgattcattacttttatgggttgatatgtcttgtgagaatatgagatgtggattccagagcttaaaatctgcacgtttagtttgaatgctaattaccacaaatatgtttttaattgataactgtgtttcgacatacttcattacgtttgacctttaagatcatttttaactcatcctctttaaaaaagttctctttgaagaaaatataacacacatcaatggcattttaattgtttacctttggaatatttttgtgttggacacaatttatccatcaaataaaaagtgaaaaaagtcatattttgagaaaataacacaaaatagggccaagtgccaaacatcctaatatatttgttttctgcatgatttattattacgccttttttggtaccatttactaagaatatgtatgacttaatttttcataatagccagcaatttaaggcagcaaagtatttgctttcttccactgatctagtaccgcctatcattgtatcatactgacctttaatccagctcttacacacaaagtcagttatctgtatacttatcgttttaatgggttttgatagatttccccatgctcatttagttatataaatgatttattatttatgttggttttatgatagtttttatgggttttgttttgttttggtgaagccattttgtagtctaacaaatatttcttaattgggtatgcatgaattttggctaagttgctccatataaataaatgttttgattacttctaccattgtctacagctgttatcatctttaacctccaagttttcttaattttcaaaaggaatttattgaatttaatctgagccagtaagacgggctttgatgttaagtaatagagattagttgcccctctctgatgtctacattactgaacagttattaactaccaaactcctgtgacacagtatccttcaaattccaaaacttagctacagtttaccttactaaaatctctgctactggtaatcagccttttagccagtgcagcatatattcagcttttgccagaagatggtttgctcccaagggcttttggctccaaagactaagtgttacttggtggctttggcaggattcagaggagcctggctgctgggaactgacatgctcagagcttgccagccccaaaccattgtgtacctcacagctctcagtgccaggagtttgtgtgccaagaaaacagaaacctgtctagaaaataaactgttttctcttgcacatgtcctctaggaagacaagaagaggttgaacctgtaaattgttttgtggttagaaaatgttttaggtttttacatgggaaatataatgctataacttcatatgtaaaacaaaatggcacattatttatgctcctcaaatcattttacctccaattattaaaatgcttatatatatatatgtatttttttttttgagatggagtctcgcactgtcgcccaggctagagtgcagtggcacgatcttggctcactgcacgctccacctcccaggatcacgccattctcctgcctcagcctcccgagtagctgggactacgggcgcccaccaccacgcaaggctaatgtttttgtatttttagtagagatggagtttcaccgtgttagccaggatggtctcgatctcatgacctcgtgatccgcccatcttggcctcccaaagtgctaggattacaggcttgagccacctcgactggcccaaaatgcttattaatcttttaagtgatcaatatagttgttattatgatgacagtcatttcagctcttgcactgaggcagttcctgtgtgtgaaaagcttctaatgtgagtgtgtgctgtggatgtatggagatcaccccagttgggtggttgtacatgaatgaatgtgggttatgtgggcaggtaatgctggagaagtcagtggaaggtgaattaaccagctaacaaaacatttggataattgaatgttctttagaaacaaatcgtaagccattaggaaagaccttccttccttccttccttccttccttccttccttccttccttcctcccacttccctttcaccttccccttccccttcccttcccttcccttccttttcttttcctatagcacataacattggaattgactctactcactttcatccaactatccctacctcttcttcctacttaccctagatttttatttctatttctctaccagttcatattttcctccatctagttttcatcagagaaaattttctgcttcatcaaacacaaaactgagatataaatgtgggagcatatgaaattagagcttgacctacatttagtacaattagtattattctaaggaagtagacagttgtggaaaaatgaaacttggaacacagaaaaggttaaattcatggcgcttatgtagcttattttcattaggcctgttacctaattacttattagaatttctttctatcttttagaccttagtttctcaaccttagcactattgacattttgagtaggataatgcttcgttgtgggtagggggctgtgctgttctttgcaggatctttagcagcttcttggcttccattcactagatgacggtagtatcccccaattgtaacaattgaaaaatgtctccagacattgccaaatgttccctaggggacaaaattgctccctggtgagagctgcttttttttagatccaggtgcttagacaaatgatgatataaatcagtacattaagtagagaaatttttttaaaaatcagtttctaaagactagatttctcaacaacttatcacattatttccaacaacattcaaattcaaaagctgatgcccaatgctagcaaagtatgaatagatagaaagtaaacatcttcctttgcattagataagatgcccagcaatggaaatccctggatttaaagaccttgttaagatgtattatgtcagatgaaaagtgctattttaataactcattgttattcttagcatggatcttttattttagaaaaatggataattagcattttggcttatcactttcccttaatgaatacaaataatttgatagacagacaaccaagagagacttcattaaataatgggattaatcagcctgggactggagtaaattagaggttagacttccagcctgagagatggaattcagggtttggtggcaatgtcatccaattcatgaaggatatttttcttgattgacctaatgttgcagtaaaaaaccagagcaagggtcaactggccaaaaataaaagtcaaaactcagcttgggaagttataggctacactgcatttaacttgcaactggataattgcaagaacacattcaaagcgtcactgcaaagcccttgttgtttagccctagctgcttcaatttctagataatggcccattattaatgtggaagtattagaaagttttccagggaaaaatatcaacctggaaccattcccctttgcatgcattatacacttcactgccatctggttatccataatatccccaaacccctaccaattttccaaaaagaactacaaataacgctttgtatttttagaacagtcttcctaacacccagagaggaaatctattgtgaagttaattttctttttcaaatgttttaaagtaaactattctttatttctaagaaacaaaacccaatgctatgtttaagcagtgatttggaactgtcttactgtcactcagagaagacaggttagtggaatctttaaggccgtggctgtcttttgaagcttatagtgtagtctttagaaagtcttcagaaaagatcatgattcttatggaaggttatttctgcggggcagtgggagaacttagatctgagaaatcattctcatcatgagttagaggaatgattttattcacaattcatactcttcattcattatccaacctacatagaagccttagttctgtgtatccttaagctgcatttgacattttacctcctgatatttttctaagtagcatttttctaccaacagactcaggtgaaaaagaaatgaaggtatcaagtatatgatgtgtacacatttagctttattactagcatcttctaagaaaaatagcaaagagctaaaacgaaaacagaatgattctataagtcctgaagggaatccttctgtgatacaatacaagcaatagaaaggccttatttctccctataaaatgtgtgtaattgtgcttttccttatttaatcacatgatttgtctttaataaacctctactggctcccaagaagtgtggatcctggtaacaagagagtctttagtgcgctgaaggagtgatggttgtgaggatacaagagtggagaaatgagaagagataaactactatactttactaagaattggagagaaacaaagagtctagggtatgtggtttggaagaaataaagattcaagaggggagggtcttcttccatatccatagagcatcttaaacaaagtttatattgtccactgatgctctgtggggtggctttccttttgtggagtatgagtagcagtgttgaattttacctcaagttactatgggatagatagggaggctgctcttggataagtaataaatgcgttgcagaagttaagaaacagattccagaagtagagaaatctatgcagaagcatatagctagaaagtagcagagtggtaattgaacacaaatctgatgacagagccaatgcttccttttattctagcatgctgctagaaactggttcttttataatagtcttaaaataccttaagtctttgagatgagatgaaagtgaaatatgatgaaatgttgaagattgtaattgaaattatacaattacatatctctttcatattaaactttcaaagtcctggtactaatagcttgtattttaaattatgtcttcattgtttaatccatattgaaaatttggcttatgcaaaattatatgcctttgacaccaaaaagatatagaaaagatatggccactatatgataaatttcttatcctctctaataagaaataaatatttagtcccaggttttgaggtgttatctatactttttcaagcctaaaactttacacttgaaaattagtgataaatagttattataggtaataggtatgtattgacaagcacttgtttgtttagatatgatactaaatggttatttatttatttttatggtcaggtttctcaataatatatccattcataattcattggcttattaaataggctctatatttcagatatatggctacagataggagccctggtgtgaggcagaggggggctgtgataatgacctttgtttcagcagtgactcaaggacaagattccaaggctcagaattttgcttttattttctctgtatgagtgtttttgtctgtcagtaaacctgttttgtgaaatgaaacaaaaaaaggtttgtttacattttggattgcctttgcattagcattttatggcaattggtctggtttgacttaaagtcctcttttttcatctttaaagtgtgaggttgctacaatattaagtgcttaagatatgccactactgctctatcaaaattatccatgcaggtcataaattcgagttccaaaaaatgtaaaggaggtcatccttttgggcctccttcatgaggccccagcataccagacctaaccagaaatggagtcttctcatgctaagtgccatgtaatcaaactgaacttagaaactagccagtttcgaaaacaggagtttcacagcaccaaatccaaaggtgccctgtcaacctgagctcttatacactgttggtagaaatgcaaattagtatagtcattatggaaagagtatggagatttcttcaaaaactatacatagaactgccatatgatccagcaatcctactactgggtagttctcaaaaagaaagcaaatcagtatatcaaaaggatacctgcctcctatgtttattgcaccacaatgcacaatagcaatgacatggattcaatctaagtgtcatcagtggctgaatggataaagaaaacgttacacacacacacagacacacacgcacacacacacacgcacacacagaggaatattattcagccttaaaaaagaatcagatcctgccatttgcagcatcatgaatggaactgggggtgattctgttaagtgaaataagccaggcatagaatgacaaatagcacatgttcctacccatatgtgggtgctaaaaagtttatgtcatggaagtagagaatagaatgatagttaccagagttttggaagggtgtggggctggggatgaagagaggctggttaatgggtacaaatacaccgttagaaggaataagttctaatgtttgatagcagagtagggtgaatatagttaaaaataaggtattgtattttgcaaaatagctagaagcgaggacatgaaatgttcccaacacatagaaatgaaaaatactcaaggtgatggataccttaaatactaacttggtcattccacattctatgcatgcaacaaaatgtcacatggatcccataactatgcacaaatattatgtattaacaaaaatacttaaaaaagaaaaaaagtcccctctgctttaaccctataaggaaagtaactttgaaatgaccaattgggccaggcatggtgactcatgcctgtagttccagcattttggaagaccaaggtgggaggattgcatgagtccaggagttcgagaccagcctgggcaacatggcaaaaccttgtctctacaaaaaatataaaaattatccaggcatggtggcatgcgcctgtagtcccagctacttgggaggctgaggtggaaggatcacttgagcccaggaggtagaggctgcagtgagtcgagatggggccactgcactcctacttgggcaacagagggagacgctgtctcaaggaaaataaataaataaatgaccaatccacttcttattccttgtttcttctttctacagccctttttttcccctataaaagcctacctctgtctgcttagctcattggagcacctttctatttagtagatgggatgttgctcagtttatgaatcgctaataaaagccaattaggtctttgaaactaaatttgttgaaatttgcttttttgatgccactattgctctttatcaaaatgatcccatagatagtctatagtcttttcttagtgttttctcccaaatctgttgggaagatactaagaaagttccgtaagtctgaaatctggtcctaaaactgtgtccagtaggtaccattgtattcaatatagcattttggtttaatcttgatcttctaaagtctgaatatgttctttagtttgtctagtttctgcagtcttgtgtactaaaagggtagtaattttcagttagctaattactatgctttacacagttataaggacgaagcattttagaatggcacttcattaaagcagtaaaaatactgtgggctcagtaatctcatttactgggtcaatagcccataatatctagaagaagatttaaagtagtttaaaaataattattcaaacgagaaagggatttcaaactataattaccatagcagtaaaggaatgaatgactccaaaggaaatataaatattatatttaaatcttaatatctgattgctgtaactcaaagggtttagctcttccaatactaaagatcacaagatcttagacctgaaataaacttcagcaagcagccagtcttggtgtagaaattaaattttttcctgaaaaaccacttgtagttaaatatccagactgacaggctttttgcagctcattcttctataagatgcttttttttttttttttttctgagatggagtttcacacttgttgcccaggctggagtgcaatggcgatctcagcccactgcaacctccgcctccttggttcaagttgttctcctgcctcagcctcccaagtaactgggattacaggcacgcaccaccaggcccagctaattgttgcattttttttttagcagagatggggtttcaccattttggccaggctgatctcaaattcctaacctcaggtgatctgcccacctcagcctcccaaagtgctgggattacaggcgtgagccaccatgcccggccaaggtgttcatttttcttagagcatttgcatatctcttactcagttttttcccatgtatttgcattttcgttgctattgcatgttagatttcttctactgtggtctgttttttgtattgttttgttttgttttgtttttgctgatgtactgttggcgattttctgtatccatgttgtagctggttaccatttttaattctcctattagttctaatagtttttctctggttgctgtgtttgcaaggagaactactgtgtcatctgtaaataatgattttttttcttctctatttcagtattaatacttcccttcaccctgcctctgggtttctgtgattacatggggtagagcttccagaacagtgtaaaataaatattagtggacattcttattttggttccagtcctagtaagaatatgtctagttaagagcttctagattatgttccaaactattattccatgagatgttaattgatttcctacaaaaaaaaagagagtcttctaaataatttccttgaactctgaattaaccaaaatgagacaaatctctttagtgaatgggcttttataacctttactatttaatatgcattgacaatctcctagagatggagaaagtatgtgactttctcccaatatatttgtcatagaacactgtttttgaagaacatttactaacatcttataaaacgatacatcagtggtatcgttctggtattgttctggtagggtactgttaattgtgatgtttggggtttttggtttcaaaatgatgttctttaccgtgttaagaaaatatcctacttttagcttacttagagtgttatataaatcaaatcttttactatatgctttactctatctggcttttgctgaatataatgttttttatatttactgatgttgtttatttgttttcaatgctggatagtagcccttacacaagtatcataaaaatttgtgtggtttgcaatttgagggagtttaaacaatgctgctctaaatgtttgtgtacatgaaaattggtacacaaaaagaatacatttttataggacatatagcaggaagtagaatttctgggtcatagagcatatatacattcaggtatacagtagaatgctacagttttcaaaagtgttaatgaaaagtttacactcccgtttgttgcctgagacttccagttgcagtgcattttttttaaacactttaacttttaattaacaaaataactcttaatttcaggtaacctggtatatatgcagtaacatctcgtttttaaaattggcattttctggattatgaatgataaggaccttttcttgtgtgtatttgccattggatttcctctttaatcaataattgcatcttatgccaattttttattgttttggctgattttattatctatatataggaatttgttacgtattttgtatattaacccttcctatgattgtgttctccctctccatagcctgcctttcacttttaatgtcttttgagggatagtataattcattttatcagtcttttcttctactgtgagtgctcttctattttgtttaataaaaatgtttcctacctgatggtatgaaaattttctcctgcactttcatcttaaagcattactctattgtatttctgatacaggttttcaattcacctagaactgaaatttgtgtataagtaagggtctagattcacctttttccaatgaggttattcagtgtttttaaaaatgtctcatttcctctgcccagtactctgtttggcactttcatcacaaacacttggggtctttattatgttgcatgggtcaatgtgtctgcccttgtgtccacaccatcttgttcctcttcatcaagggcattagctttcttggccctttgcatctctataaaaatgttaggatcagtttgtagagttccatggaagaaatcttgtggtatttggggattttgattgagattatcttgaacctatagattcatgtgaggataatttacctctttacaccattgaattttctattccatgtatatgttatgtctctccaaatatgtagatcctttttaatatttctcaataaaatggtgttattttctccacagaggtcttgcacatcatttattagacttattcctaggtatttaatattttgaggcagtaatgaatggcatcttttcttaaatttttagctatattgaaatacaacatatttggattctgatctgtatctagcaatcctaactctaataaaaactataacaaattatatatgaatttttaataccatgatataatctgtagataattatatttttgtttcttcttcaatcttcaaactttttttattttttcatgacctcagtataatattaaatagcagcggggatagtggaaattattgttttattcctcattttgaagggatagcttccaaaaatttaacattaagtattaagtacaatgtctgctatagaatttttgtttagtaaaaacattttatcagactaaggaagtcccttgttgttttccttaaataacagttttaaattattagtcaacattgaatttcctcaaatccttttgctgcatctgttgagacaatcaaatgattttacttttgagatgatcatttgattttactgttaatattgcaaattacattaatttatttttctccccaactttttttgttgtgaagaattgcaaagagttgtaagtttctgaacaccatttttacttgaaatataacagccaacagacaaactatgaatatttagattttggcatttggaagacattttctcaaaaatgaatgaagtgggcctgtctcttcaggaaaataacaatgattttttagaatataagtgagattggggaccaaaagtttgaaaacttctgtcctcttagaaagtgtaatgttacgctgggcatggtggctcactcctgaaatcccagcactttgggaggctgaggcaggcagatcacctgaggttaggagtttgagaccagcctggccaacatggtgaaacctcatctctagcacaaatacaaaaattagctgggcatggtggtgggcacctacaattccagctactcagctactcgggaggctgaggcaggagaactgcttgaacctgggaggcagaggctgcagtgagctgagatcgcaccactgcactccagcctgggtaacaagagtgaaactctgtctcaaaaaagaaaaaaaaaaaagaatggaagatacttaaaacacttctaattttatacctcctctcaagttgtatgctattttataattttcattataaaatttcctctttgtttttgtatgatgaagctttactataatgtttacatgtggatttattttacttgagagtaattgagccttttgaatcactgaattctcataaattctgaaaaattttcactgacttgcctttatccattttatctcttctctccctctgagatttcaaataaatgtatactagtccttctcattgtattctgagtctcttatcttatttttttaaatctcatgtttcattctgagtacttgcttctatcttctctttcattaattctttctttagctttatctaatttgctgttaaattcatttcttgagttctttatttcatgtattatatttatcaattatcgaatttctaagtaactattttacatatctgctccatcactttttatagttttcatttccctgcaaaatttttcactagactccaatctcattgaacatcgtaaacattgttttagtctatatcctgtaattccgtatgtggagattttatgtgagtatttttgttggttttctttaatggtggtttgtttctttttatatctgaagtttttaattgtgtatggggcattgtgcttaaaactttatttgtaacagtgatttgagacctaggatgatattatcttcctccagaggagatttttctttggttgttctaggtgtctaaagtcaatagaagttcaggaacacacaataaaattttcaaaactgaggttatcagacacaacaaattgacataaaataggttgacagattttataagactggtttattttcagttcagacttaatcttacaataactctaggaatcctagttcaaagtgaatgtttgtttacccttgggctctggattctgatttctattcttctaggcccaacatgcttccagaaacagagctcacctattccttccagaattactaatgcccctggggcaaaagcagattttagtgttagtgagctctagtcttctctaggctggtaatttcctaccatcttgttaagtcttcgatggtttagagatgaatttatatttttttttttgcagctaagttattttccatagaagggcagtctgatatttgaaagttaacattgttgaagtcaaagttctcatgatggtactttttaacaataatgaagttgaatatcttctgtactttgggttttcattttgaaactagaaggcgtacttatagtacagctttcctggagcctatcccatttgcaatcacagacctttaactcaaagtttatgcaagccacattcttctccttattcctaaaataagcctagtcttagaatgtacaatgtaaatatatctctccttgcctccaaggaatgtacataaccccactaagacagtcatgcttccctatcttttccatttactaattttgccaccatttccttccactttcagtgtggaatccagttgctagtgcccatgactatttctcaacttccaactttcagctttcagtacactacgcaccatgatctcctgactagctgctttcttcattcttgcctctgtgttccagaatattatttaggcagaatacataccttacagtagcttcatcacatatctatagtttgtaaattctagctgaaacatcatttgcaatcatttttattctcaactctcttactcaaaatattctttttcaaaagttcatcctattttaaagtctgttaactgtaactcgaagtaccctatctctcatcaattaacacttgcttccttttagaaatataagagaacctagagtgaatctagttgaagtcctttcttataaagtaacctgtttcttctctcattcttgattcattgttcctgtttccaagaaagatgtatttctgcctttccaaagggtaccaatctaactatactcttaaattattgagtcttatcttccatgtattctcactccatcagtggtccttctcttgtatcgtcaatcattccatctttaccaacctcctcctctcaaactataagcccttaaagtatccttcagcccagaaagcaaaacaaaatgaaaaaaaaaatctgtattgagtgaatggcaatgactgttccatttaccactagctttatatgctggcaggaatcccacatgaaaattaagaaaatttattaggtagtatgattttccttacctccaaagaaaattctagccagagaattgataaaacctctaatgctatataattaaaaataactctgtaggaaatagaagttctcatgcttggcactacatgcagacctccagtatactctccatttgctcttcaaaatgtctgacttctagggctgacttcatgtgtaagtgcttcttgtcaatctgttagtatttgaaggataactagaaggatttcctaccccagcatcttccctaaggattcaaatttattgttttgttttcatccctttgatcaaacattatggtctcctctcttattgtttttaattcttctaggagaatgtttctcaaacctaggcatctattggaatcacatgtgggacttaaacaaaattatgtgcaggtgccatcctcagaaattgtctgtcttatttggtcaggggtggactcccgccattgccatttttaaaagttctcctggtcattgtaatgtatagccagttgaaaactatattcctagttgagtgacatgcaagtacactaataccatatagcaagaatcagttttcttaccttctttttgtgacattcctgtgtggcattttagcagcacgtcctgagatcatcctcctgaaaggagaaaaaaataatcaagaggtaagttggccataaaattatccaagttttactgtgacctaatagtaataataggatatgaattattaccataattcacatccatatgagaaaactctttcttggtttgagaaaacgtgttttttgcctcccagtctggagaaaacatgttgcgttcctctggcacatgtacatgtttatgcagatccattccctagaggaacttccaaataaacggagcatattatatatggcaaccgagaaacatagctttatgttgcctgttgtagaattatttcatgacattaacatttttatgcacccccatattaagttttatgcttagatttaatgtcaccaggtaggaaccaaggtaaatgccacatcccaaatccacatagagtcagagctaaaccatcagttatcaaatctgtctttttatgtgctgtgagatttatacacattgctttagaaagctgcattcactggaagatgctggtttgtggaggggcaaggaagtacatttacaggttagcttggctgaactgtgttgatttctctgcagaacagtcttcacaattctttgctcacagttaaaggtctgctgaaagtgactcagtgtagatgaaaacagcttgcttaatcattcctgaaacacgggaaaaattaaaatacatttttttatcaagcaataaaaacaatgccagattgttaatgcctcttttgtacctttcacttaaaagacctcaaaaagaacatcaaggagaataaaggcaaaatctattccccaatgccgtcattatacatgttgaagcctctaaaactagaactctaaagacattcaggaagagcaggggaataaatgacagcaaactgaagagtgcgtctctggagctttgttcaacctgctttgttcaaattcattcaaattggataatgaaaagcaaagatcttttttgtttcaacattaaagtagtaaattagtgagtggtgagttgctaattgttctgtaaagtatttaaggtgccaggagtgtcccatctccaatttttaaaatggcatccttatggttgaaatgaaaggaaccattagagtagtgtaaaacaatgtttttaataatttatgctggttcaattgaaatgattttcatttagaaatactcattgaagttcttgtttttacttgagataagcaagttttattttagacttcaagatatcaaatagaaattcattttccggatggggctaaagtagaaagatagattagagctatccaatgttgtgtttcaaatctggctgtttctacttgctttgaaggtatagaattagcaggtttggttaaattttacttgaattttgggtgaccttttctaatcctgactgtttcataatttagtgtcttgaccttcgttttccatagagccaccttagtgataaatgcagagatttaataactagaaccagttgacaggtgacctttcgtacatggctgttcctttttgctgtggaaaccactgttttgcaagttttattatttcacaaattttaattatttattctattgtctataagcttattcagagagaaaaaagtaaaggttaaatattacattattcttactgattaaaatgtaaagtgcttggcacttgtcccaatatatcactcagaaaggatagggcaatttgtcaggttcatacccaaagaagagaaagggatggttttcccagggtggttggtaaggatgaaactggcctaggagagtgagcaatcacatcagctaagtgaaggtaacagatgtgtgtgtgtgtgtgtgtatttgtgtgtgtgtgtgtgtggtgtgaattttgaatggaggaacagaagggttcttttactgtatgtgtaccaatttaaagagaaaagtgaccctgagtcaacgagaggtgaaacttgccagtcagggtgaataacctgtcagttttggccatttctctctctccctctctctctcactcactttctctcttacccaggaaagaattggttaagcatatcatggtaaattgatttctggaatctatgtcaataaaatatattgtttacaaacaaggaaataaggctgagtaattataaaaatgctagagacttttagaaagagttaagaatatctacactttccccccaccctacagtatcagagaacataggaccttcacagggaatcaattcctctgtacttacattcttcagtatttttcagaacaattcatttgtatgcctctcaaatactcatgcttataataaaataaaaataaaaacaggcatggtataaaaagacccatcgtgtgaacatagtaccccagtcagccattgtcctggatcctcatagaagagaagagccattcatgagttagagacctcttgacagtcttcaatgaacattgattcccaaggacttgcaaatggccactgtgaatttctaaagtgaatttctgaaggaggcttttgggcagtggggaggtattattccctttagtcctggagaccagtttagaaaataatatcatctgccatggtcttttttgcccgacatggacagtaattatttattgcttgagaatctttcactgctgttgtgaaagaaacagtttgaaaagcaaattgagtaagcagatgtgaaggaccatttaaaagctaataaaattggtcatgattagtttatcttagactgaaatttcagccatatttcaagctgaaaatatcaacaaaaacattttcaataattttttatgtcatgctagcactattgccaaaaaggaatagtggtgaagttattgattacaagcatgtttaaagcattaatctatgatttaattaaaataatttaaatataatagtgagcaagatttgaggtatctgcatatatgtatattaagaatagtgaaaatcagtaataattatttctttgatattccacatttcctaatgctgctgtgagtgcatttcctgaaagttaacatatgctcttctttttaacctgaaaaatatctagtatcctttggacatcatgtttatctcaacttcctcaactcagtaatggaaaatgaattaaggtaacttgaaaaatctgccatgaaaattatgtggaataatgtaataaagtactgagaaatatgactgacctgtaataggcattcaatcatgtgtatatcaaaaattctactacactatacttataggtctctctggtgctgtttcttcccttcctctctctctcaccttctacctgtgccccagccaataatcaagtcattttttcctgtaaggtggcaaaatgtcgagattcattttagcagagaaatgacttgttttacaaagccattccttaggcttctaaaacagcatacgaattgactctagttgatcatgaaactctcccacacagcttagcgctgtgtgctgagattaagttcacactgattagaattttaaaattattttactcttcacagtgccttgcacagaataggtactaaataaaaattatgtggttattcaatagatgtcaccaaattcttaactcctcccaagctgattgttttgaaaccagatgtgctggtatagagttagtatacttttgcagaggaaaaaaatagccaaaacaaatacagtgctgttaccataaaagaaaatcaatattttagaccttaaataaaaggaagtgtttgacatttgtggctttctttaacaaggacatagggacccagacagggttggctgaatatttgtggtgctctcagtttatagacacagctgaagcccagtgaaaatattttgaatgtacaagatgttttcaaagatgctttgagtgcacaagagacaagatgaagaagacaagtttgtttttaatgaaaaaaaaaaagcaaaaaatagagacaattcaactataaagggagaattcaaaatttagatgtggcttgataaagtggaactagataaatcttaacaaagttcttggaaaatccaggacctcagtctagaaagaaagagtaactgcctactgaagcagaactgagtgagtgaagacatatggaataaattttcaagcaaagcccccaaatcaaataatatgaatgagttgaagaaatagcagtacactttaacagagaaagttgagatcaaaagacgtagtaataaagctaataagaaaaactgagataactagataagagcagattttgggtcaaattgtccatttgtgcctaggtatttctttctttttgtcatggcatactgtagtttgaaggtgccttcagatgtataaatgagtcccttgggctttgcaagcaagctttttgtgctacctgaagctcctgattatgattaggaatgttccatttgtctggcccccacactcttgtcatactttaaagatggttcctgcaagtaagtggtaaaatagagcaattatcatgttcatccatgtctcctggtaccttattcaggaaggcagatggctaggcaaaactattacccagaagtatagaccaagaagtacaaacgtctcttaagatgacggccatggtgacagtagggccaagtgaatagtcaaacaaaaaaacaaagtggcaattttatagatcaccatctaccctcaaagccgttgcattcataatactctacccaatgacatatttgtcacataaacaagaggctgttgttcccaatgtttgccctcaagttgttagttagctgctgacctcataatctgcacagctgtggcatcccaatgtgttgtcatgaaacagattgtgatgtcttaattgatcactttcagaggttacaattgtcaagtgagaccagtgtgctggtctcacttaattctatattaagccttgttacagcaaaactggctaattcattataatgactaggaaatccaatgtaatttgctgcattttatagatttgaacatatccaagactttttctttttcttctttttgattgtttaaatttgtggaggctataccccaaccatgcttttattacacaacgaagcaacttcttggaatagcaaatggaatgtaaccccccgcaccatatgcatcttggtgataagttggagtatgccatatgatacacacaatttaaatcaggcattgatttgcatgactgtaagtgaattggaggactcagctaagagtaatggatgtcaggctctgctgcaagccgtctggcaagaagaatattatgttcttctctattgtgtaaaagaaggtaggctcctaagaggttgaggaagggtcttaaatcaatgcgtgaccccaaagggcacttccttgtgcctccattttggtcactggtgaagtcttcactatggcactaacctataaaactctcttttccaagtgtcctaatacactcattcaccttgtatggatctattcccatctggtgcctggaccacctgctactcacattagttgagaaaccttactgtgttaggggtgatgaacagtccctttaataacagagttttaagacaactcataaatgggccctttgtgcattctgcagtcaagtttttttcaannnnnnnnnnnnnnnnnnnnnnnnnnnnnnnnnnnnnnnnnnnnnnnnnnctaatttaagttaatgtaataactgttagcatccaaaatgcaggaggaagaacaagcatgtttatcaaagcacttttttatagtgagcaaaaaaaaacagataatagctaaatgcccagcagtaggcaaatcggtacatatggtatatccctataatggaatcttgtgcaggcataaaactatctctaagggctgacatgggaaaggctgatgatttttgattaatggtttctcattaagtaagaaaccaaggtggccaaagaatataaatggcatttctcaacctgtctaaaataatatctatagaaaggaaaaaaatatgacaaaaatcggtgtagtgttattgagtgatgagaatatggagaattttttaaatcattttgtccattctttttagtttttgagtttcccatattactttactaattagggggaaaaagtttttaaagcagtttgagtagtttcaattcaataggctgtaccttcagaatatttccagaacataagcggcttctctccatctcctttgctactcaacatggtccacatcactatcctctcttgctgggattgtagcagcggcctaatctcctgcttccaccctggcctcttttttttatcaactttccacacagttgccaaagctgttaaaatgtaactcagctcagtcattcctctgtcccgagcccttcaatggcgcttcatctcacgcaaactgaaagaccccaagtgatttctcccctgctatctgtctggcctcagtacctacttggctctccccactggctctgccaggctacattgctcttcctattcctttcctgcctcagggtatttgcattggtttttgcatttgctctgcaggaaagcttttttcctaaatatgctcatggccaactctttcacttcattcaagtctttcctcaaagattattttctcagcaatgtctttttctggttactccaccaactctctctctctcacacactcacacacacacgtgcacacacatacctcttaacctcctttcctgctttaattttctcgatttagtacttagcaaaatttaacatattatatgggatgatagtttatttattgcctttctcctgcacccaacttgaatataagctctatgagaacaggagtttttgtttatagttttcactgctgaattctaacccctggaactgtgcctgacacatcgcaggtgctctatgactgctgtgagtgcctaccattgataggaacaatggtctgttacagttgtatgatgactaactggttgatttttatgcagtatcttacctctcagtgtagttattttaattcaattgctttcacttcctaacttaaccaactgagcctttaatgtattccagggactgacgggggaatggagttaaaatgaaaaagataggcattgttctgacatagtttactgtctagtggacagacataattaaacaataaagtccaacacaatacataaaacaaggatagtacccagtcgagagaggctactcaccaacaggcacaataaaaattcaagatcgaatgtcagatgcaaaatgtggaatctcatagaagggagatgagaaagatgtatatcaaaaaagcacattgcttctttattactgttttaaaagaaagggtgactatgtgggagagaagcagcaaaagcaatctatttggttgttttaggagaactgaaagcaaggaataacggaaagggcagtgggcttagagttagacgatctagatttgaatctaacactgcagctttatcatctccaagtcctgaaagctgatgcttaacttccacgagtctctattatctccgtggttaaataaaaagggagaaagggacttagactaactatagagactgtctgtgtatataccttcccatctaaaaggaggcctttccttatccatctaggataaacataaacacagacgccaattaatatgatgacttgagggaatctctgaagggtctctgtaatatttctgctagcctgggacttaccttaagtagttactggttctgaaaatctgttttataacctcattgcttgctgaactcttcatatttttatcaattgctcataaccattcatgcatacaggtaaaatacataattgatccctggatatgtttcttttgcatttcctttatagccaccaaccttattacaaagatcaaatcttttcgtattttcttatttcacctgaaattacagttctgaataaaaatatttatcatttagagtggaaaacaaataactattttttgcctataattttaaaccagggcgtggggattatagaaattaaaattattttttgacggtatactttttcttttttaatggaagcatgctgttaacttgataatctgtggcagcgactgtaggtttggtatttgtaggtacttcagagatatttccatatttggtaattatacaatatatgaacttttgttttcccataggaacttgtttgactaagtggaatttactaatttacatgccttctttctctatttttcagcctttgcaactggactgtgacctttgtgccatagtgtcaaactcaggtcagatggttggccagaaggtgggaaatgagatagatcgatcctcctgcatttggagaatgaacaatgcccccaccaaaggttatgaagaagatgtcggccgcatgaccatgattcgagttgtgtcccataccagcgttcctcttttgctaaaaaaccctgattattttttcaaggaagcgaatactactatttatgttatttggggacctttccgcaatatgaggaaagatggcaatggcatcgtttacaacatgttgaaaaagacagttggtatctatccgaatgcccaaatatacgtgaccacagagaagcgcatgagttactgtgatggagtttttaagaaggaaactgggaaggacaggtgagccctctctgaagcagctttattgtcttttattatcttttatgctaaatcttcgccaattccttttgcaggatataaaatgaacagttatttatttacgctgattgttatatgttttgactattatgattacttgataagccagcctgaggtctcatttattccacctatactacctcctgttctttccattctgattggtttgagtctccaagaaacactggatacttccccaaggtatcttttgatctttttttattttgttccatttgctattgattgagttggatttcagctgaaagaggaagcctaaacatttctgtttcaaaacctagtaatggtaaggaactttaggattatgcattaatctaaactcctctgggaattttgccaaaattttacctgagaccacaaacagaacaggctactgattctccaataagattgtgtagcttcttgcatgcaaataggcactgtgatcctgaacatcataacttggtatctaacttgttcagcagaataccatattgaaattatacgtcccttaaaatcattagcagttgaattattttaaagaaatgaggtataaatactattcattcaattatccaaaaaccaatttgcattttttattacatccatgttttttctgtagcattctgtaaactacacttcgcacttttttcccttgaagcctgctttcccctccccttccttctcctatttcctctgtttgctccatttccagctccctcatctcttctgtaactgaattgtgtgccatgttttctttctttttagaaagataactattaaaacagagaaaacaggaattacaaatcagacaatcttagttcttatatctagcgctaataaagaactgttaagggaagatattgaaaccaatagctaaagttttaaattatctgtgaattttgcttatttgtgcaatatcatggataaattgagcatctgctatagttccaatattagcattccaattttttcaaaatgtatgtatttcactattcaatattatcaaatctaagcttttaactatattgagctatgtgctcagggaggtgcagtttctgatatctctggatgtaatttgaatgctgatgattacttaaaaaccttaggtggatcaactctcctttggtaatgtgggttgatctgaatttaacattttctacttctgagcaccaaaaatacacagcttcatatgaaatacaagacagaaatagccatgaaatactagttcctcggactgtatgagttagcaagaagaatcccaagggtgagatttgaatcaatgtagcataaactgtccaaaatgacaggcagtagagatgaaagggataggtatggtgcttcaaagaaaaatggtcatatgtcacattattctatataaatatgaagcctattcacaaagggctttggaaatttctgatctctccttagcccagagcaatgcaattaatgaaatgtattttggtttttcattagttagagttagccctcagggtatcacccagacatacctataagccctagagtcatttgcggggaggtatcagagaagagcttagcatgctgttggttcatgtttttatgtgtttatttcacattgacttttgccgtgagctttgagggagacaacaccatcacatatgtgtaaattgtaaaagaattgggagagaatagctttgggagatcattttcttactggccatgatgaagaaagctgtatcgtaggaaaattactaggtaattttactcacttgataaagttaatttgcaaggtatcattcgattggtagagttaccaaaatgagagttaaagaaacagaaatatggtttcagtttatggtgcattcttatctttttcactgagtctatttctgtctggttgcttcacttagtactccaaccagacaagagaagacaactatgctagtgttttagaaatggacagaatgggtgatttaagtagagcctggttggataataaaatgttgatcaaaatgacctcagaagctgctgttcccaatctatatcctaaccccatctatgttaaagacttttattgtctaagaatttcccatgacaatctgatattcattgtcaaatttcaaactagaatatatttttcaacttttcatgaaggaaaatgtcaaacttatagagacactagtggtgtaatgagcctctgtataaccatcacttagcttgaataattattaattcatgaccagtatggtttcatctatacccctacacactttctctctcaccaaagactatgttgaaacaaatctcagatatcatataattttatttataaatattttggtgtatacctctaaaagataaaaagtcttaaaatcaatacaataccattgccctacataaaaatcaacaattctgccttaatatcattatatatttagtttgcaaatttcccaattgtctcattgatatatttttcatagtttgttttaattaggattagcataaggtttatacatagcaattgattgatatgtgtcttatatttctcctaacctatatagaaacttccctgtctctccttctctcttctatctccctccctgcctgttgttgaaaaaacctaggcattagtcgtacagagttttccacaatctagatttgttaatcacattcccatgatctttctttttctgctacactggtatttatgtattgaggcttggttggattcatgtctttttttttttttttttttttgccaaaaccattaggtggttcttctctcagaagaaatactctctagttttctctttttttaatgttagatgccattaatgattatttgctagattatataatgtattaggattgcacaatggtgctatttcatcttatcctttttatttattagctgatatattttattaagagtaatttaccctcttattcatttggttaccatgagatagaaaccaatcctgttctcctctttatttaccagttttaatgtattagtttccttgcattctctataggcgtccactattattaatatttacatattgacttacagacttaaacatacttgaagtattttaatttattaaaattatatccttatgctcagattgccctattttggcctatgggaacctcttcaaattggctttgagtccttttgacatgcccttagtagtctttgatagcttctttgtttcctggtattatggaatgtttcaggctttttttgtacatattccgaggcagacctggattcagacatttctgcaaagaacgtcagtttcttttagtagttaagagagcataatattagcaccattgctgctcattgctactggattggtctttgtttcttgggctttacagaggacagaggtagtatgtaaacaatatatactgtgtatattgtttaaagataaaatcgttatgagttcaaaccgaaactttcaattcaaatccagggctatcaggttttaagtttacatcctctatcttatatctgttccttctttttaccatgctgacaatcacaggtctcagagatttcaatgtaattattcatctgctttattccacaacacacacacacacacacacacacacacacacacacataatcttagaataagaataacagcacaacaagcaatataattatggtaaacactttaaggatattttgcatcaaagaaaacatttgaatggcaaacatttatgtggatctgtgctcacaaagtatatgttggtaatagtctccaaaaaagaacatttttctcctaagtaaataggagtgaattaagtggtatacatcactgaagtcatgaggaaatagagaataaggggtgtccatttaattttgctttaactgtaaagctattttgtttgatttgcctgtagttattagaactttttagcaagtagttattttcatcatcaagtttttaacagagagacaatgtcatcattattatgtataatttatagaattaaaaatatgtcactagtagttaaagtgattcatgataggaaaatgattacatggagttcctcaaagaaaactttgcttctcagcttgcttcttaaaattgtaaaaatacttaaaaaaaaatatagcccttccgtttaaggtaggcatcttttcacttttccaagtattgtgggttttgttttttttttttttttttgagacagagtctcactctgtcacccaggctggagtgcagtggcatgatctctgttcactacaacctccgcctcccaggttcaagtgattcctctgcctcagcctcctgagtagctgggactacaggcacgcaccaccatgcctggctaatttttgtatttttagtagagatggggtttcaccatattgaccaggctagtctcgaactcctgaccccgtgagccatcttccttaggctcccaaagtgctgggattacaggcgtgagccaccacgcccggccagcattgtgttttttttcttaaggaattcctcactgaggaaacatgaagcagtagaagaaatatgtatatcatttaaatgtcttagaataagtttaggccaactcacaaacatattggaatacctttttgaagcaaatggaatttaatttgctttctttttagttactgtctaaaattatttggcttgtcaattagacagggtgaccttgtgggaaaggctaagagagcagatagagtaggttgctttccctttctgtctttatcttctggggcccagttgttttttttttctttctttctttttttttttttaattctaggttcattggttagtggtcacttttagattgtcacctaccaatatacttctggaaaacaagtattgtgaattctacagaactttcatttcttccagaaatctttgaaattaaaggttttatattcaaaacaacctggaccaaaataccttttcccctttgaatgattggtatgcataaataatactagcctgctgacatttacacatttgcattaatacatcttaagactgaaatatgatggaaatgctgtagggctgatagtggcacattgtgccacacttaacaatgaagaatgtgatcatgttcctggcacacacatatgcaaaaggaatgttaacttttctagagaagcagttgagagccaatgtgagatattctgctttcctatgggtaggtgggcaattgcagcttggatttcactttagaaatatgcttgcaaatataggcacattatttaattaagtaataattgagaaagcgatagtccccattaaaagagcaaagctaattctgggctgttaaaggactctgagctgccctaaataggtcttaattagctggtgccaatgtggctccaccttcagggatggatgaaattaatgaaagctagcagcaaatagaatcaatatttcaagatgttcctgcctcaggtgaagaggatgaaaagaaagggagtcattttcaaagactgtttaggaaacaatgcacataaatcaatttctaaaaacataaaatgggacactgatttgtgaatacagtatcaagatctctacctggctcatctttgccagcctgttccatccattcccactcaatcttaaggagagaaaaagaaatcagcgatgtgtcattcctcactatctttgggggtgacagttttataagctagcaagggttttaagggcagcccaggttttgctatttcagcttggccattttgaaagtttcttgtgtcattgcgtggtcaagtgtagagatgaaattggctctcatccctcaggtttgcaaacctttagtaatatctagagtggaaaggggtttcaagtcttcttccttgaaaatttgggaatcctcttgtaggtccctctgtcaacacacaaggaagccgccttaacacacacagtgtagcttgaaggtggagggcaaaaaccaaaaccaaaataaaacaactatgctagccatatcttagagtcgccatggggtacagaaatgtgcatagtttgcccgaagaaatgccatacctagattccacaaacaaagatgtcaggttattcctaactcagaataaatacctgctaaccccaggaaaacttcgaccaagagataataggcaaaagacagtattaaaaacagtattttccatttttttttcattttgaagatggtctttgcaaatataagtatctcagcactttttcaggagcaatgctgacaaacctctgttagaatgaattaatatccccatcccagctggtgtatttggcaggaacaaaaagttcatgcagcagtcatgggcagatccataggactccttagtcaaaaagcataatactgcattcagggttgtgttttcacgctaacaagcattatgaaacaggggaacttcctttttaccattatttatgatggcattcagtgacctacattaggcctcctctgtaatacaaatgcgctggaaattaaaaattcaaaaaaaaaaaggaacgatctattttaataatgggaggtagggaagggcatttgtaatttataaagatatcagtacaaacctttcatgtgtttaaaaacaccctcatgtgcacacacacacacacacacacacatatacaaatgcactgggtgaaactctgatgtatttgacaagacaatttaggattaaaacaagagcaacatctcaagttcagtgatcatattttaaagcaaaaagctgtgcaggacatcagtggttgtggaaatcaagacttccaagcagtctactgagtgaaataaagttctctgggccagaggatgacttgacagaaggccagattctcagaaaaaattatactgtatagaaaaaaaatcccagtagacatgtatgctcaacagttctctagatgtagtggcttttaaacccccaaagggtgtgaaactcaaaggcaaaagtaggccttaaatgggaagcttcattaaaatgtatacagacttttaaattttatacaggctttaaagggtttatttatttatgcatcatgggatctatctctgtagttgacttacttctctcttacaattatttctcctctccttagatttttttttgacctatgcctccttcttcaagtttagttcaaaattaagacaagtaaggatagttacattcttgtctttaaaacatatgagccagcagcaatctctgttttttctctattcttggatgcttgactctttttaagacagagttggttgttttgaaaattttcatcctatactacgcccatctgtactactagatgtttaattgcttgggcaaatatttcaaaatacctttcactgtgtctgggatgttataagagctctacagatgtttgccgaattgaatttttgcttctctgtaaacagacttcttattagatatggtattactgacctacatggactcctctagttagctctttttctttctttcttttgttcttgtttgttctttctttctttcttttttttttttttgtttgtttgtttcaaggagtggaaagtttaataggcaagaaagaaggaaaaagctccccgtgcagagacagagggaggggtgctccgagcggagagagaaaaaccccatagctccttttcttagtgaagagtaggtcctctagatcagtacagtgcttttcaaactttaatgtacatcaagccacctgctgacccaaatgatttgaggcagggcctgagaattttcatttttaacaagtttccaggcccggccatcctgttcatctgcagatggcactttgaattatgctattaacaaagtaaaagacattcattttttcttgaaccaaataaatacacaagtcaagaatatctgtttcccaaatagctttgtaatctgcttgtagttggatcctaactttgtgatcctgccctattccttagcaaattaataatggggctcagagaagtccttaagaattcaactggagacttgtgtatctgaattgtgtttatgtgttcatttctttcattgaacaacaacacatgtcctaaggacagggactacacccatctccattttattctcagatctagcatagcggtggttagccataaaatacagtaccaaaagaatgtattattttcactctctgtctttcagttaaaggggccatggatgtttcaagtgtccttaaattgacctcagcagtaactccttttctttgttctattattatcactaccactgctctagtttaggccttctttacctcacacatacgtgactgcttatctagtcctacctctatgttttggcagagatagttccctctgcctaaattgcacttccccctgtcaccatgcacacacatgcaggccatactttatgaacaagtcaaatgttaccttttcatgaagcctcttgtaatatccctacagaattcctacttcccctgaaaatcgtagggttatggacttccttgttatagaaataataactttctaccatgcgttattgttatttatgtttaatctcttcaagtggtccataaactatttgagggaataccagccttgtttctccaagcaccttgacataatgcttgactttaataggtattcagtaaagatttaatgggtgaatgaataaataaatggacgagtaaaagaagaaataacacttaatatcttttttaagcttaaaagtccctttgccattgttgaaataccagtgaatttcaaaatactttttttcaacaagaagggtcacagcaatgccaaagaggcaagttctaggattggattttgatagaaaagtttccacagttctatttagagagaccacgtcttactttactttacccaaaggctggcaaatctattaccttctctagggattttgtgattgggcactgggtttttaataagtaactggcagagccattcctcaaatacaggtttccattttagtttcacttcagttgtgaagcaaattccaaggcttcactcacaattctgttagctgtcagttgcctggtgagaaagcaaatcctagtacccaaagtcaaagttatactcttgggcttcaggaggcaaatataagcaccaccacagaagtcagaaaacaaaatacccaagtaaaggagaactgaaaactctcataaaacaacctgagcttctctaccaaactttaaattgccctccagaaaatattttcttctttggtaacaaagaaaataaattgccttactttttaaatgccttcatgatgaacataaagaaaagaaaaaattggtagttgtgtctttcaaccaactgcataaatgaagaataaatttgtatatagactaagaggaaaattaatgaaagcatttctggcatattcagatcatgtcactctcctgctcaaaatcctgcaatagtcctccattttccttagaataaaaacacgtgtttacagtgacttccaatcacttctgatgagtctaccatgatagcatttaaaattgaaatccttacctcacatacccagcattcccaattttccttaccttgttctattttatttttttctcttatagcattaccttctaacattctatataatatacttatttattttaatttttagtgttttctatgtatttctcctactgggatatgagttctctaaggccaaggatcattgttttgttcactaatatatctcaagcacctagaagaatatatgttgtgtagtagacactcaatatttgctaaataaatgacctagaggtggaaaaacaattgaataaaggattcaggcaaacttgcaaaaagttatcatgggggtctttaatcgcttaaagaaaaaaatgcatccactcagaaacagtgcaattaagttacaagtttaaggctgttttttctgctgttgttttacaaaaaggtgctagtattgaagctgtcttatccaagagatcatcattgcactcaaggaactggtctgactgatttttattcttcaacacatggaccagttgtttaaacagaattgatttctgatttctttggtatccaggggaaacagcaaaaatgtctcattcttatttggattagtagaacagcggttctcaaacgtgagcttgcatcagaattacaaggggtgctgattaaaacacagattgctgggctcattcctggactttctgggttggtatgcttggattgaggcccaagagtttgcatttctaacagaattccaggcaatgttgctgctggtcctgggatcacacttcaagaactaccgtgataaagaattctaagatatcaagtcacattcaattattttgaacatttggtcctataatctttattctattggcatattgttgcacgaacatctagcactatttttgttatgatatttttcacggcgaggagttttttaacctcctgtgaaagtcctactgcaactctgtcattttattcttcactttcttaagatcttgctcctctgtaattataccagatggtgctgctcagtagcttataagggagtgatgcttcatcattctagacagagagacaaatcactctgttctctgacttttgaatcaagaatcaacatttgtgtgtatgttcaacctgctatttgctttgcaattttgctcattaggtatttattaccctgacagtgtatgagttagtcattttccttctgccgtgtagttcagattagcactgtttgacaactgccatcatcacagcattacctccaataatatgtaatttcttttttgcctatgttatctgggtgaggtagttatctaggaagtatatctacaaacggaagatcacaaacagcattcagttctctgacttatcatgttagaaatggataactagggccatttccttggagtttctagccctgcgattggcattgctgaaaagaaaggaatattatgaccaaagccaagcgttctttttcatttattgtatgctttttctatgaagaaggtggtatgagggaagcatacaatttaatgagaagcattgaaaaagaacagaaacatttattaagctctactggcaaaatggataggcaaccctttacagaaacatggaaaccatgcagagcagagaactggttaaaatttagaatgtggaaaacagtcttatctgagatattcaacaattggagcaaaaacatattttctttttctttataatcttcactaaaaggagaactaaagttattactagataactcatgcaaaggcactattacaggcatgtaataacattcttctgacgtgaataggttgtttattctctcctaaaatacttctctacacagttttaatattaaacttatgaaattttcttgaacttttgttgattggagggtagtagagagagaaggggatatagttgggagcttttgggaaggattgtcaatctatcttaattcttctagttgatagtagatttttgaccattaaatctttactaacaaaggtgttaatatcctcgtaatgaaatgagtgtcctacactacatcagctgtatcattgtggaggtacaaaagctccgaaggtaaatgcaaaacaaagaatggttgctattccaaggtgactttttcatgacatgttctatatttctgatatgtcttctagtcttaacctgtgagttcatagcaaacacagttggttttatttaggagtgcattaaattttattccattgagcaaatttcacttttgcttcatagtgattgtaattaatttgctctttatcttctctttatctttacttcactcattactcatctgacagctcgccatcccatcttaattgggagagaagacccttccaaaagtgaaccattggcagttctgtcatctggaaagagatacataaaatgtgttaagaaacagaaatgactatataactggttcatcatatttccttagcaggtggattcttggtgggcaaagatcatgttc

SEQ ID NO: 830 - DNA, 1638 bp, Homo sapiens
agttttcatccctcattacctctgtcctaggcaattgggatagcctcctaactagtcactgcctacctatactctctccctgctccaaagcatcttaaacactgatgtttgattataactcataacttccccccaccccgccttttttttcttttttaaaaaattatactttaagttctgggatacatgtgtagaatgtacaggtttgttacataggtatacatgtgccatggtggtttgctacacccgtcaactagtcacctacataaggtatttgtcctaatgctctccctctcctagccccccattccctgacaggacccggtgtgtgatgttcccctccctgtgtccatgtgttctcattgttcaactcccacttatgagtgagaacatgtggggtttggttttccgttcccatgttagtttgctgagagtgatggtttccagcttcatccatgtccctgcaaaggacatgaactcatccttttttatggctgtgtagtattccataatgtgtatgtgccacattttctttatccagtctgtcattgatgggcatttgggttggttccaagtctttgctattgtgaatggtgctgcaataaacataagaaagtctgtgattgctgtgagcttcatagcagcgttccttttcctgctggttgtgcgtcttgtaaatgaagtgaatttcccattgctactaaactgctttggacaacctggtacaaagtggataccattctcctacacatacaggcggccccttcgaactcactatggatacataaatgtgaagacacaagagcctttgcaactggactgtgacctttgtgccatagtgtcaaactcaggtcagatggttggccagaaggtgggaaatgagatagatcgatcctcctgcatttggagaatgaacaatgcccccaccaaaggttatgaagaagatgtcggccgcatgaccatgattcgagttgtgtcccataccagcgttcctcttttgctaaaaaaccctgattattttttcaaggaagcgaatactactatttatgttatttggggacctttccgcaatatgaggaaagatggcaatggcatcgtttacaacatgttgaaaaagacagttggtatctatccgaatgcccaaatatacgtgaccacagagaagcgcatgagttactgtgatggagtttttaagaaggaaactgggaaggacaggaagagcttagcatgctgttggttcatgtttttatgtgtttatttcacattgacttttgccgtgagctttgagggagacaacaccatcacatatgtgtaaattgtaaaagaattgggagagaatagctttgggagatcattttcttactggccatgatgaagaaagctgtatcgtaggaaaattactaggtaattttactcacttgataaagttaatttgcaaggtatcattcgattggtagagttaccaaaatgagagttaaagaaacagaaatatggtttcagtttatggtgcattcttatctttttcactgagtctatttctgtctggttgcttcacttagtactccaaccagacaagagaagacaactatgctagtgttttagaaatggacagaatgggtgatttaagtagagcctggt

SEQ ID NO: 831 - protein, 263 aa, Homo sapiens [sequence omitted]

SEQ ID NO: 832 - DNA, 231004 bp, Mus musculus
  misc_feature (1)...(231004): n = A,T,C or G
atctggcattgggaagagagagacacacttggcatgggtctgaaacctcaaagcctaccccagtgacgcattccttccaatgatgccaaaacccctaatagtacacatgttctatgggggccatttgaattcaaaccaccataggctgtaagcccagcctaatgtgaagaaaatccttggaaagcattttacaaaatgccagatcagtcttccttaaactgctagtgccatcaatacaaaacctgataaagaaagcggaggacccagatgatctagggaaacacaatgatgcccttaatgaggactatgtaaagaagatctcagcaattaaaaacaatcacacacgtacacacacacacacacacacacacaaacacacacacagaagaatgaaaatcctgggaaagaggtactatttgtaataatatttaatctgtaatatcttagtgttgaatggattttaatttgcaatactgtcttcctgttgagtttcagttgtgactcaaaaaattaaagttatttaaatatattttagaggttggggatttagctcagcggtagagtgtttgcctagcaagtgcaaggccctgggttctgtcctcagctctgaaaaaagaaaagaaaagaaaagaaaaaacaaaacaaaacaaaacaccaaggtaactggcacacacaaccttatatatatatatgtctaaaagatggccactttataaatttattctacttttgaggaccccagtcctcttgcctgaagcagtggattagggattcccaggaactttcctttcatccagatagttttattctggaaataatgttttaagaaatgaatatatattaaattatttttgaatcaatgccatcaggaacataaatgctcatataatgtgactatttacattaggaatattcttgactgaatacacactggaaatgataacttcacggttgctagggtataataaggtctaaaaaaatgagctcacacaacaatggggctttcagagtttaattgaaaaacatagtcacatgaaggtaactggagccatgactacaaatctttctgaaaaatcatcatctataacaggctttttcttcatttattcctagctctttcatatatatcacaaaagaaaaagggaaaggaaattggatacaatagaaagcaatgaaatctgcagtcattttttttctattaaatagatctgtaattgccattgcctctactctttcaatccctttctttcagatttttatttgggaggtactttctcaacagttttcttgtttgttttgttttgtttgtgagtcattctagcactggactttcctctctcaggatccaccttctccattttgaggtgatttgtagtcaaatggtaagtcgtatggctaatacataaaaaagacacagatcagacaaataacagtttcttctctctattgctcattttccaatgggaaggagggagatggaaaggggtagagagacggggagggagacagagacacagtgatagtatgtctgtgtagttataattttatacatttttattttatttattttatagacaaggctttctaggtagcccaagctaatctcaaacttgtgttgatcctgctctgcctcttcagtgctaaaatgatcggtgagaaccattcttctcgatttgcatttactgagaaccactactaagtttaaaattcaactgtcacttggtttactatcaatctgaagcagattgataaaatatttaatgattacaattaaccaattgtttttaatgcttcaggttccttggaacattacatccaaactcccatggtattaggttacaaaaagaaagaaagaaagaaagaaagaaagaaagaaagaaagaaagaaagaaagaaagaaaagaaggaaggaaggaaggaaggaaggaaggaaggaagaaaggaagaaaggaagaaaggaaggaagaaagaaagaaaaagaaattgtctttaattaatagattcatgtgtacatcttaaggtttgctcagtaggtctaatatctcaaaaaaactgacttgattgaatttaataattcaaattagtcaaggcagattttttttcttaatgtaacattaagtattttgttcttattttatccttcatacatagttttatacttaggattgaaatctaaaaggaaagacccgacttttaaagaattagcaacttgttaggcattaacttctagtagaatatcactgaaatgctcggatctagtttttagtaaggtttacgaaagactcaatcctttgaggttctaagatagtatcccagggacacacatgtgccattcttgatttttctttcagatatgaaaggtataaaaggtgtgaacaagtctaaggagatgataaaatggaaatgtcccttcttcaggcacaaatcagcaaagctttaaggattagaactctatcataggacctacactattggggagaggaattttaaatcttcccacattaaaaaggctttacattgaccaatcctaacgattttgtttttataatggaagagttgagtcccaccaaggaaatgtcataacaggtcttctgtgatattgggcattcatgtgtttcatcttcctagttcatctggtccatattcttaaccctaatcgattaccttgctcagccatcagttgtaagaaccacgcaaactcactctccagagaaaggtttctctcaaggccaacaggcttgtccatgaaactgccagcttttctaattagtccaagaaaaactggcctcagaggaatgcttccatcttaagttattgagtcatcctttcctctttgtgtgtttccatgaaacaaccaggtcatctttgtgcagctgaccttaggatggtaaatgctgtgctacatcggttcttaaccagcagggttgcaaaccctctgcgaggtcaaacgacccattcatgggggtcagttaagaccttctgaaaccacaagatatttacattatgatttataaccataacaaattatagttatgaagtagcaacaaaaatacttttatggttgggggggcgtcaccacaacatgagggaggaactgtgttaaagggtcacagacttagagaagttgagaaccactgctctactaaaatgcaacctcttcaaaggcctcactcctttctcagctacatgagaaaaggggttttagaagaaggatttaattttaattgtgtatcataaaatatatatatatatatatatatatgtatatatatgtatgtatatatatacatatatatatatatatatatatatatttacacttagataagtacatagacagatggggacagaaaaacgtgctattgaaaatattgcaaataaggggccatttgtgacattgggatcactcatgtagggacaattttgcctaccaaaccttaataccttttgtttgggtaagatctcactgattttccctggaaagctttcacatgctaactctggtgactacaactgtgggacaaaaatctactgtaatcctgagatcacatggcatgctgtaagcagaacagaggaactgatctgggaaatgaacaagtctctctccctcaggatcagtgctttgctgagacagagaggtatggtcagagtagaaatagtcagaacctgtgtggatctttcttggtgtaaccaggagaaggcagtttctctcatcacactgaggactgccttgagctgccagggattgtgacaacagcatcatctctgaaaaacacaactcatgaaggagagggtacactctgctcccctaatgatgtccaatttcctttaacagctttttcccattgatagcactgtttgtcacatttctgagacttgagctaatgaatgccacacttttaagtaagcccaaatcaggaagaattcctgttttcaaggaagtgactaagattttcttctttagaaatacaatgagaagaatgcttcagaaaataaaaaaagtgggattctaataaagatgatgttatcttatttgttctttactcagagactatgatgtcacaattaggtattgtacactgacttttagctctgtttttgaagtgtgttatttgtacaataattaataataaaatgtttagccagttctactaacattataggaaagcagctgcaaagaatttagcacaggaatgtgcaactattttttggcatgctttaaacttctcatctttcataattccctcctttcttttcataacagtgtattttaaggacagaagtcattaaaagtgctgacactgaccattgctccatcatcattttgttggtggagatgtgagtatgtgtgtgtgcacatgtgtgtggaggtcagaagtcaaccttgatgttgtttctccagtgccattgatcctgaattttgagacatggtctctcactggtgcctacggcccacagattaggctaggcttgctgcccagtaagacccgggtatctcggagtctatggcttcccatcattggcattacaagcccatgttccacacactcttccccccagccagatttttatgtgggctctggaagtggaatacagatccttccccctttatgattggcaaattgctgatttaacaatctcctcagcttcctaccatcatttgatgggcttctctttgttcctcagaaggactactgaaacattgaatagtaactatatagaaagaaggtattgagtccaagtactgaggaacaagcctagtgggtaaacaaggttttactgaacaagactccctaaccagttggataaatttggaatactgctccctccttttgggccagctaagcagtaagtgttttgcttaatgatacacatgcatataagtgaatatctaattatgcatgcagtgttgtgaaatcaccaggtcaaattgatttcaatgtacagcacatcagcttttgaactacatacaatgagagaccttggaacactcagccctaaatgggatgtctccattaaatcccttttctttgccagaggggatggaagacacctagaaaacggccctcaaaatcaacatgggcaaaggtcataggaactcacagagtctgaattaggatacacagggcctgcatgggtcttcacctgccctctgagtatgtattatgtctagtatttttatgggattacagagtgtgcaaactagtgggtctctaatgcttgttctctctcttggattctttttcttctgttggtttattttctccaacttcaatgtttttgttttgccttagtagattttattttgttctattcttttaaaataatgaatgaatgaatacctagtcactaggataaaggttaacaattgaactgtcacttattcctgctaggagagggaaaatcagttttctccaatagaaagacacgcagtatatcaactgctccaggatagatataatggtcaggagtagctgaccaatatctacatagtttgtgtgtgtgtgtgtgtgtgtgtgtgtgtgtgtgtgtgtgtgtgtgtgtgtgcgtgcgcgcgcgcttttgtttggttacagttcaaatttttttgtttgttttttcttttcaggtgttgttttagttctttagttttttggagggagttgctatattaaggttttttgtttgtttgtttttgtttttgtttgcttgtttgtttttttacttatttctggagaaagaactagaaattgggtaggtaggtaggtagataggtaggtaggtaggtaggtaaaggatctggagaaacatgggggaaggcaagaatatgctcaaaatatatttaagtttaaaaattgttttaaaacaacaaaaccacccctagagcacagatgttgggtactcttgtacttctggttcagcagtcctcctactgtggatcctatctgctattacaaccattcctgattcatgtatatatatgaattcataaatattatatgaatattataataatcttaaatattatagttttcaactctagcttcttattaaatactttttgtgtggtaattctcatctgaaattcttatcttctagttttgaagatgtgcatcaaggttctttcattatctttcatgttttattatttatattatgagtgcatttggggtgtgtgttttgcctgcatgtgtatggctgtgcactatatgcatggatggtacccacaaaggcaaaaaaagaaaaaagaaggacaaaagaaagaaagaaagaaagaaagaaagaaagaaagaaagaaaaaagaaaagagaaagaaggaaggaaagaaagaaaagatatagaactctcttggaaccggagttacatgtagttatgaggtgccatgtggaggctgaaattcaacctaggtcatccagaagagcagccagtactctaaacctctgagctacttcttcagaccctcttagtttattttactatatttttatctgtgacaggattttactgagtttccaagactgtagttcctgggctaatgtgattctcacgttagcctacaaagtgtctgaagctgtaggttttagacttgcgcccatcatgcccagcaaggttaaattcagaactgtgtctagcaattgagttacctacctcacaagttcatcttgccacttctctgccccaattctgtgtgtactgttgttttatactatgctaccagtaatatattttaaagtattattgttgagttccagatgtcattttaatgatctgcatgtattcgtatttatccaagtactacctcagtgggaatcttcacctttgtgtgtgtgtttgggcgaggtaggggtggcagcgtgggggaggggatccttcagagtccccagctgccattgctggtgtttaaaggtgttcctccctctctcaggcagtttcagcttcaaagcactcttggatgtgctgcttggcttcctccttactcatacagtctcacgctgtcacacttattcagcactcttacatctttgagtgggacgaatagaatatttctatgggagagcctgaacgctccattcactgcaaattcaatttggtgtctcttagcaaccagatactgctaaaaactggagatggtttctccttctctgccatcagcctttcctgagtttctgagcatctttattggttcccaatactaatgacaaatgtctgaaagtagaaagaattacagcaccaagttctcatggcatcctaccttcctggatcttgggcttctacctgcactactcgggcaactcatcagctccttacagtcatgtttaaaggagtcgaagttgcccaggggatttggtaggagagttggtcaagtccccaagcacctttttttctgaacattggtttgtttgtgctacttggacattctttatattgagttctttgtaagttttgtgaaaattccatttcgatttacagaagatatatagatttcaaatgtttgtgtccaatctattattcttttcctgtaagacttcaagtaattcttgagagcaagtcttctaaatcctcattcacactcataatctttggactttggcttttttataattaattaattaattaattaattattattttttaacactccctctcacaatccctccctcaccacttaactttggatttttttacatgtaaatttatgtttaaaatttatcttcatttcattttctttcacgggatgttttgaaactatcttttctttcaggtatttaacaatagttagttaaatacatctttcttcctcactggcatgaaattctaccttctgcaaactggaaactgtaatatacagtctctttacttctgaactcccattggtctgactttgagtaagccaatcgttcctgttactgactgaacttcagtaattcattttaccatgcttcagctcagagatagtaatgatttgagataagatggcagcaatggcaatacaggacaaggtcagaggagtggccttgaggactgtcactcatagagcttgagggatttggaagctgtagaaaatgtctgttcacatacaactttaggccttctggctttgcactctcaaagatgggagagtcattaattttatgattgaggatataggagaaacagattctgagatacaagaaggatctctgtgttaaaagcagaagcagggacatactggatctgtataaatatctgatgatatagtgaattcttctagtgttggctgcaaggatagaaacttgagttataagttaaagatttcagatgaaatccagcattgattacataccaaataaacttactgcagcactaactctaaaaatgtatgatttttcaagaggcagccctttccatattctaaaatcctatgaaatatgccaggaggctacaaatagtgttttcagtcaagtgagaggcccagacttaggtaagaatgagacagaagctacatttatcaagcttgggagatttaggggacaaaaatgtttcaagggattacataaaagttactagtgaaaatcacttgaagaatttcccacattaaccctaagtttgcctagaatgaaggctagcaaattgttacaagggctgaacatgactctgaagagctttaagcatttagcatttggtagatgctctatcatgatcaagcaatttgtccagaatccagcctgagaatgaacaacttttcatcatagttcatctttatcaacttcaaccaatcttcctttatttatctacaaaacatagacagtctcactttaaattgcaagtataacctctaagatgatgtttgaattaagtacaaagaataggaagcataaaaatttaaaaccaaccaaccaaccaaccaaccaaacaaacaaacaaaaccctagcaccaccacaacaaaactccgatgtaaggcagaggtggtgacacatgcctgtaatcctaagacagaggcaaggaggactggcatgtgtttgagcccagcctgatctcctaaggaaaattttgtttaaaagaaacaaaaatcaaaataaacagaaagattggttttgatgtataaaaattagtttcacaaggtttctgttatttatttatttatttatttatttatttatttatggctttgagcatttttcaacttatgtttagatcataagagcaaatttatagacttcggggcttgtgcagtttatttatttatgtttttaaatctacatttaaaaggagagcttcaaagaggaagcaaacatttaaatatatgtcttataagtagttctttctcttccttttttcctttcttcctttcttccttccttcctttcttccttccttccttccttccttcctttctttctttctttctttctttctttctttctttctttctttctttctttctttctctctctctctctctctctctctctctctctctctctctctctttctttctttctttggttttgttgctttatttttattttattttattaattaatttacttttgctttaaatactttccttctcagtgcagagaccagaaagttcccatcaatttactctattaattcctgagtcacttttcatgtaacacctcctccctccctttaaacttcagcaaaaattttaatgtgtaaagataaaaggtggtttctatgtgtcctcagagtatcagatttctaaaaacagctgacaacagcttcttttgtaaccaagtttaatgtaaaagcacaatgagtatgcaaagctagaacccagatgcagagaggcaacaaactgatatagtgccatatttaaggtaagacactgtgcctgcattctggccatgtccagtgttcatgccacaggccactctgtttcatcacaattttgccactgctgtggatgcacaagaaccagcaacttgccaacctcattactttgggtagtgtcagttcagacaaacacaccccacccccatgtgtttctacttcagtgtcagaaggaaatgcagccgcagggagaacaaaaagagctttacccactgtctcctgcctattctcaagttcttccgctgcttgagctgtttgccctgggcttggctttcctgtgacctccctgcaccaggtagaaactgaagaccagctactgcagacaagtacctccccaccttagggctgtcctaccccgattggctcccatttcacattctgcctgtgtgggcaattatgagcaaagacagaacggtagacaattgacatctagaaaccacaaggtcttgtaaaagatcaggtctatataccaccgaagacacaacaatggctttatctctggaagaatttgtctactcccttgacctgaggaccctccccagggtcctagaaatccagtcaggcatctactttgaaggtaagtatttttctaattctttaatttgatagaatgttcttataaagtctcttggaaatttgtgggagaggttttagtaagaaatacgtggaaggctgtgtgtatagttcagtgattcgatacttagttcaaacatatacacacccagcaaacaaagtgcaagttgtctgaaggaaagttgannnnnnnnnnnnnnnnnnnntcccagctggtgaagaaagaagaaactaaggctttaagaaaggtggagtggaactttgtgaattgccatttgccattttttttcttggtaagcattcgacaagtctgcacaaaggatgttctgtctctgccctactctttgaaattaattgccatcaggtaaaaaagtttaatgttgctgactattgtttttaaactattaaaaacagcaacatcaaaacaaaaacccaaacactatcaagcttgttttgtgttttgtttcacccaaaatgattgcacctatcaagggcacagtcttacaatgaatgctgccaagttcggacttctaagcttgccttgtacttgtaatcctctcttcctgctctacaaactccttaaatggtgggaacttttatttaaaggtaaagaaattagtgcctattgactgtagagtatcttttaagatttgtgttgaaaaggtaaattttaatgaggattgttgaatactaagctggtgaattttggtgtaacttactgtagtgtgtaaaatcccctaatatgaacgatactaacattttaaagttagtttggcctggatggtggtggtacagctctttgatcccagcactcaggaggcagaggcaggtggatttctatgagttcaagctagcctggtcaacagagcaaattccaggacagccagtgctacagaaagaagccctgtctctaaacaaaacaaaacaaaacaaaacaaaacaaaacaaaacaaaacaaaacaaaccttttaagtttggttacatataaggttctcaaaatatttcctagttggatatcaatttttgcttacaaaaaggggaaaattaaagccaatcaaaaaaaaactgggtctagtcaaattactagggagaatggttggcatgtgagctttcccactcacagtctgtcccatggttagatttccaatttttggacttttcactgtagtggaattgcacaaatcgttcagttcttttttccatttgaagtacaatagtcaataagtcatatggaatattaaacacttggtaacataaaataggcatcttgtcaaatgatttcactcactgtgactagtacatggtctgcacacaattagggtagagtaggttgagctgtgattgtgcggtgttagatgtattgtatatatttgagagtttggatgttttcagttcccagtgggctttcgagatgtaaccctatcacaaattaaagaatatttattcagtcttaccttaccaaaacaaaacaggttgacacatgctacctatatatttacacacccataagaggtaatgggttgacagtacttgctctcagattattatgaggttttatgtaagtttttgtgaattgtttgggatcaggtcgtcttctatcctgtcttcctcagaccatgtagggacttatgcttttaagacagctatcagttgcttcttgtcttatggtttatgcttttagggctttatggaagacatctttcgaaacatttaggaagagttttgacaacagttttacagtttcatattttacattcagtttattttcaggatgcaatgctatgccatggtgtacggggacccgactttacatttctgtgcatctttagctgattttccagtatcattttgttgcttccaaatcagatgcaacatttgtctttgaaatgcctcttttgttttgttagttgatttttaaaattaattttggccaatcgtatacattgtataaatgggcagctatgaaattagcgttaatatatgttcaatgtacttctcattccatgtatttttattccatgtttcaaagttaacttagttttttacaggtttttttaaagtacatgtagaaaaatatcaattgattctttaagaaatctaatgaagaactttattggatagtattgatttcatatattaacttgaagaaatgttaatctcatttttattattgaaacctattcatatcattgtctttattctttatgactttactactatgctaccacttaattaaaatgaatttccacaccttaagtatatccatgtaaccatcattcaagaaatagaaaactgtaagtgttctagacgattcatcttacacactttttaattgttatctactcccttccccaacataaccaatactccttgacttctgctccctcataagctttacataaacggaaaattataggatgtactctttcagttggcatacatgtagtgtaaaggtcatctgtactattctatacaatttatttatttctagtgtatagtttttctttttttttcttctttccaatcctagtactggggattgaaactaaggcctttgtgcatgctaggcaggtgctctaccattaagtaatagttcccaacactcttatcacttttcattttgatacagggtctcacttagctccataggatggctttggattcactctgtagcccaggcatatcttcagtttgcaattctcctgcttcagcaaatagagagtccaggtttataggtacagaccacaagatccagttgtgtatagtaatatagcattggatgaatataccaaaccttacttacccactctactgctgatgggcatctggattaaagtcactgctagtcttttatcatgaaattcttactattcatacatgttcataagaatgtaagtaaaattgtgatggtgaatggtatgtatatcatgcttggtgagtagtgaaagagacgttcccttcattcattctacatttccagcattagtctcttgagagctcctgctaacgtgaagacatttcctgtgatgtcgtcttgacttaaatctttccagtaggaacactgtggggagatcaggtgttagttcacatctgccttttgtctactgacatagaggagattttcattttctagtctgcgatatttgcagattctctttaggacatggttaggtatggctcatttatattaggctttatacatttttattaatgacttggtgatatgccgatctgatttctgtcctgagtatcttcttccactgttcagcttaacctttcaccttctcaggagttcctttgcatcaggtgaagttttcaattttactgttaggtgctcagtttacaattacatttctattatattttgctaaggacattttcatttactatgaattgtggaacaattatacattagcttctggaatttaattatttactatttacttcatatgtattctccacatggaattgattgtattatatatgctttgaaaggagggctaagctctatatcattttttagagagctaattagtacagtgacattgagagagagagacagagacagacagtgagaggcagacacacacacacacacacacacacacacacacacacacacagagagagagagagagagagagagagagagagagagagagagtttctatgtatccctggttgtccagatattcactatgtacaagctgattttgaactcatagaaatccccttgccctaggctcttaagtggtaatattggactataccacatctggctggaaaactcttttgcataatgctgtactgggtcccctaataataaatactgtgcatcagaccagggtcttttccagtgacttgtctgcttctccaggactgatcttttcacagtttccctgtctgaatgcacgtgggcctgcagcattatagaacattcaacttatatgctatataaggatatgctgcaggactgtgcttctcaaacttgattgtacattggaaacatctgacatgtttttaagatgatcctcaactggatgtgtctctacaagtaaagatttaattatgtgagagggaaggtatcaccagcaggtcttagacatctccctgatgactctaaagtgcagtcaaactgaaaacaaataatgtggaataaagtttccaatgtgtttttatacttcaagttgggctcttcaaattttcatatatattttagtattaattgtcaacctccacacaagtcctctctgaattctgatcagcagtgacattttagggagaattaacatcgttgtaaattaaatcttccaatctatgagctgggtatgcctctcaagtcttttttcttttggggtagtactgttggtgcttttgttgttgatcttttcattgtttccacatttactctgagtatttttttcacatcattatattaataaatgatatttaagtgactgtggaggcccatgcctataataacagcactggggaaactgaggctaaagtttggaggccatcctgggataaatagtttcaggccagcctaagatatggtgtagtgatctatcttaaaaggaagaaaaaaaaaagagccaaacaaaaaaaaataaaaacaagaaattcttccatgtttttgtttgttgtgtttgctgaattttaagatatgtaggttattcttgatattttagacacatcaaatttggccaggtctgatttctcctttctgggactgtactttcttctttcccttggaacactggttagcgtttctagcgtgaaatcaatcagggttagccgtaaagtttatggtgtcacatttatagccacagaaagcatctgaaacacactatttcaccaataaaggtatttttttccagcagagatttctaaaacataatactttaaattatgttcccaattatttagtaaaagcatctgacccaggaaaattgtttattttttattaaaaacaaaagtaaaatacaaacaatgggctaaagagatggcttagtgattcgggcagcatagtgttctttagagaacccaacgttggttccagcaccatgtcaagtggttcatcactgaagcaagtccagctccagagggtctgatcccacctctgtgggcagctgccttcacatgtacatacctacccacaggcaaacagacatttgtataattaaagctaataaaataaatctttgaaaagaatcaaaatatagagcaatttctagctcaggaaatgttggtagagagtggtcatgtatcctagggtggtttctagaaaatcctcacaagcgcatgtgtactattgttgctatagcaaccagataacattgctcttttatgccataaaatactgtcagcatattgaaaaactctcgtatgaattcttgtagtgtgtagttttgttgttggtgttttttttttgtttgtttttttgtttttttgttttttgtttttttaataccattggctcacctaagtagagactggtgtcctctgaagttatcaagttgctcttgcccttagccatttttcggtttcttcttaccttctttgtatagagcagagatacaatgagtgtaggaatccatgtcttagcttagtcacaaagaaaatcatctcaaattccttcattgacttgtaagtgctggaatttatttttcacttaagaaattcctatcttttccttgtttggtaggtatttacatgtaaataagttgtttttgaagttaatggtatttatcattaagttaataacatggttttctttctcaaatctgtttatttgacttacctttaactataacgcacacacactttattttaactggctttaaatattcatcaaggaaccacttgaagaactcattatatatgtaaggccatgtgtcagggacgttggtatgtgtcactgcttccataggacaagcgttagagtgaagaacctttccaacgggtttcaggattatgtaggacacagttgctcattgaaagtagcacactgaggatgcactcaagaaacatctcttattaagagctgataccagtcaacagcttccccatggctattgctaacagctttggtaacctgggtcttgggcaccttccttagtggctagggtgctccaggaacaaagctagtagtcagaattccagaaccctgtatacgggcccacaagatggcctccattgactcagtttaccagagttgatctcagcaccactctgtccactgtgctaacaaggctggctgtatactctttatagtcaggattttcatattcaaccataattaaagtagccagtagacttatttattttagaccaagataactttatctttctctaatttcaaaggtaatgaatcttctaaaagaggagttttaacatcttgcaaatttggtagaccttacctgtaagactccaatgtgaatttatttggaaggaaaacagtttgatttcattaatattctctagtttttgttgttgttgtttgcttcattgatttctgaccaagttttcatgactttctgttcttgactctgttctcttgggatctccctgtcgctgtgtattcaactatagtcatttaaaatcattacttccatcttgacaaacatatttaatactaaaatgtttatctgtgtgcttttgccatgtgtctttttcagacatgaccttgccctgtaagacacactgtttcttttttcagttccttttggttgattgagaaagagctgggttgacctcacactggatcctctttgccttagtctctaggctgctctgccaggattgcaagctgggattaccactttagctttcattagttcacaattctagtgatactttatttacttttaaattcagcgtctatttgttcattattcctgtaggacttaatttagctgttcttttgcttttaatgggttttattccatttcattggagaacagagtattatggctttttcttttaattgtctgctcttcactatacagtacggtatgaagcatatcctactttaaggctacaaagaagctaaaattaaaaacaacagacatgaggtgttttgaggttctgtggtaccagactgaattctttttacctacaaacaaccacagtagcaagaaccatgctagaacattctagcatacaacttgtgactcatttttggaacgtactcttgtcctaataatgtgaaacaaagctgtaggccatgaactccagcctctgagtcctgggtaagttaaacatgaacaatgatcctgtccctcagcacgtcgcgtttgccctgtcctcagttgtgaaaatgaggattcacctcactctaaaagatgaggtagagatgaggtgaacatattcagccagatgagtagcccacagaaatcctcttgtgaatcataactgtgattaccactacataaatagtgatccgtgatatgaaaaccttatcaaccatttctaaacaaaacaaaacaaaacccagataatttgaatcttaatgcttcatacacagtacaggtggaacacagggggaaaaaagtaacaattaagacattgattttaaaaatccctaaaaagccttacaaaatattaaactagaaacttaaaaaagtaccttgctagggtgcagtaaagaaggctcgggggtaagaagccctggctgtgctgctcttgcacaggacccaggctggattctcaatcacctggcagctcaaccctctgtacatttagttaaaggaggtccagcttccccaggcacaaggtacatgcatggtacatacacagaaatgtatgcaggacattcatacaaataaaagaaaaataaacacatcttaaataatttaaatgaaaacaaaaaaaaatctgtgaaacaacatcgataacaaagacccagattatgataaacggcaaacaaaaggatatatccagggtaaatgcagtagacaggatgtacacatgctgacattctaagtcttgtcaacataaagtaaatatataatacaaaaattagcaaaaatgtagaacaattcatataccagatgatttttacatttgcttatttattatttgtttgtgttatgaatatgtactactaacaaagtggttattaaacaataagtctttgcttacctttttaaaggtgaaagttataaaaatgattcataaaactccatgtaggaagccagtttgtggtatactcctgtaattccacactcaggaggcaagaacaggaagcaggaagatattaattaagttggaggctagcctgggctgcatagtgataccttgtatcaaaaaacaaaagcaaaatgaaaatcagttacatgtaaggatgcaggagcagaaccaaggggagccacgtgatgggtaaacttcactgggattctatgtagcaattaggtaattcgattagcatgtaaagtatgcacaaataccagatcctcagaaattaacttcaaaataaaattacaaagaataaaaagtggatatctgcatgagaaggttcattgaaacaagtcttacagacaaatactaagcttatgtcatcatggagtaccttgtataattttaaaaatccgttatcaagaattattgcccaagaagccaacattacatttaggaacaaaatgcaaagctccctccttttggaaaaattacacatttaaatgcatgctaacagagtcagtgcatcagaaggagagttatactagggtggtcaggattcaccccttaattttcttcccacatacaagcaaatcttacatccctacttccaaaatgtaggctgtaaccactcatttcccttaaacctaaatcaaggccccaagggtcctgacagctttgaggaaacaaaatttgaacaggggtctgaatacacggaggaaatgcaccctgcaaatacctggggaattcacactcttgttgaggaaagagcaagtacaaacctgcgaagagcttgcttgcttcgtgtggttaagaagctggggcagggatgagaggtgtgaggttcagacaaagcaattgaggggagggatttagaagacaattctggtcaaagcatggaagacagttgtgattgacaacatagcacaaggtgctgggggtgatgtaagatgaggtggtcaggaaagacctttggaggagctcagatgatgtagaaattgagagatctggaaagaacagatagggaaaaatcatttggactttaaaagactttttaaaaaattatattagatattttcttcatttacaattcaaatgctatcacaaaagtcccttataccctccccccgccttgctcccctacccactcactcccacttcttgggccctggcattcccctgtactgtggggcatataaagtttgcaagaccaaggggcctctcttcccaattatggcccgactaggccatcttctgctacctatgcatctagagacacgagctccgggggtactagttagttcatattgttgttccacctatagggttgccgacagaagaaaaaaatccctgtacttggaacatatagaaagtaaagcacagaatttaacaccaaagattgcgttgtaggagatgggtaagggatccaagagccctttgcaaagattactgtctgctctagagaacatgtgagagtggagtgtggacaggagagtggaaaggacagggagacagattaggggagcacacaccatcacagagggcagtggggctctgttttaggctgaaaaaggcaagggcttctgactgagccaccaaccagacagcatacacaggctggttcaaagcccagacgcatagatagcagaggagtgcctggtctggcctcagagagacttgaggacccagggaagtgggaggcctggccacgggtggtgtgagtgtgttggggtgggggacaccctcttagaggaaaggggaagaagaatggcatgaggaatggtgggaggggggaaccgaaagtggggggggggggcaatggatggaatgtttaaaaaaatggcaaggcagtacaaggcatgtttttaactgtagggctttagggagtacgaagcaaagaaaggactgaaggatgcatacagggctttgatggaagctattgaatgaaaaactgagtattggacagagtagtggcccagggatctgagggagaagagacaaatacattcgtgttgaatctaaataaaggctaatttatctaagtataaatctcggaagcattactgaaaggccaattttgttcttagagaaagcttcatcatgactaaagtgacctatctatgattcaactcatcaggatttatttgaccaaagatctttttttaaaaatattttttattattacgtattttcctcaattacatttagaatgctatcccaaaagtcccccataccctcccctccacttccctacccacccattcccattttttggccctggcattcccctggactggggcatataaagtttgcgtgtccaatgggcctctctttccagtgatggccgactaggccatcttttgatccatatgcagctagagtcaagagctctggggtactggttagttcataatgttgttgcacctacagggttgcagatctctttagctccttggatactttctctagctcctccattgggggtcctgtgctccatctaatagctgactgtgagcatccacttatgtgtttgctaggccccggcctagtctcacaagagacagctatatcagggttctttcagccaacgcttgctagtgtatgcaatggtgtcatcgtttggaggctaattatgggatggatccctggatatggcagtctctagatggtccatccttttgtctcagctccaaactttgtctctgtaacttcttccatgggtgattgtttccaattctaagaaggggcaattaacaaataattctcacctgaggaatactgaatggctgagaagcacctgaaaaaatgctcagcatccttaatcatcagagaaatgcaaatcaaaacaaccctgagattccatctcacaccagtcagaatggctaagatcaaaaattcaggtgacagcagatgctggtgaggatgtggagaaagaggaacactcctccattgttggtgggattgcaggcttgtacaaccactctggaaaccagtctggcggttcctcagaaaattggacatagtactaccagaggatccagcaatacttctcctgtgcatatatccagaagatgttccaactggtaagaaggacacatgttccctatgttcatagcagccttatttataatagccagaaactggaaagaacccagatgcccctcaacagaggaatggatacaaaaaaatgtggtacatttacacaatggagtactactcagctattaaaaagaatttatgaaattcctaggcaaatggatggacctggagggcatcatcctgagtgaggtaacacaatcacaaaagaactcaaatgatatgtactcactgataagtggatattagcccagaaacttagtatacccgagatattagatacaatttgcaaaacacatgaagctgaagaagaacgaagaccaaagtgtggacactttgcctcttcttagaattggaaacaatcacccatggaaggagttatattgaccaaagatcttatctttgaaaaaatgatgcatacttcatacacattattctattgatatttatgttcattctagagcatatggtaaaaaattataaatgggtaatgataaaataatcatgattaaaattactcaaacttttaattcagatttttcatctatttttattttacaaaactatgattttgttataaaattaattatagatattcttgtgaaaagatataaactaaaaataattgaaaatattttcattacttaatatgctcacttaaatggtctgcaatgtggttcttatgattgtattttaaataatttcagtgctaattgttcagaacagctaggaaagagatctcagaaaagcccaatatgcacatatgtaatagatgcacaaagcaggtttataattaattcttgtggacataatgccacatgtgcaaaaatattcataattctagtcttagtcatgtcagaaaagggataactgtacccaactgagaagcttggtttaggagtggtcctttcttcatgtgatccgcaatctccagttctcaaatttctatgtagaggtcttgcagagcgtttgtctactatgtaacaagtggttagaggataaccaactctaaagttatctttaccatatacacacgaactatctggggttcaaaccctggataattttaacatgtgaaggaggataagttgatctctgtaatcaaatcatcttcagttatgtgaaagatagtttatcatcaagaaacagataagagaaaaatttaaagttctcaatttatttaacttttgaatatgtgaaaggcatgtcttttcttgccctcttggtataatatgacttagttaaatgggtgactatatgagctgtagggagtgtcatttaggaatatatgctttaataaccagtgcagaatttgccatcttctatccttgtagattgtcaaaatggaaccccccaacagccttagttgctaagtaactaaaacaaacagagaccctgtccccatccgcctctgctgggtgtggagcacagtaagttgtatgtcttattgctgaaatttctactatcttgatgcactttagaaaatgtaaccttcaacataatctaaactttctcactgtaacaatgacacaattatatatttattatgattaggaggggagtcttttctttttgtttttgtttttggtttttttttttttttttttttgagacagggtttctttgtgtagccctggctgttctggaactcactttgtagaccaggctggcctcaaactcagaaatccgcctgcctctgcctcccgagtgctggagggaagtccttatcaattataagtaactagacattagcatatctgaatcacatatcctcagagaccttactggagtaatactgctcataccctttgtttatggagaagtgagatctccatgtagcacttaggaaacattttttctgtggcttcttgactattactctttttttaatgccatcatgctggttttcttgtagttattaaaattttgacaaaaactctgtgcatttcaacccttctaatttttaagacttagttttcattttagaaaattatttgcaaatggttgccgttttggtaactatggaggcataaaactattcatagcactacaagaaaaattattgtttctattttttgtatttttgtattatttttatgtattatctaattttcacaaaagggtagataaacttttaaaatgacaaatgttgataatgacccctcaccccctgtgctctatccagtcttatctctttgcactatgttcaattattgcctaagtttaaatcatcagaattttgttctaggattactcaaatttccaccctatttgtcttcctgattgcatccttggaagcctaaagtctgtcttccatcctgattcccgagtcatgtgtctgatatgcgcattaaaatatgtcacttctctgtaaacatcttcccatggagttccattttttttctctttcaaaatagaaacttctgtcagtaatcaagccccacattgtttctctgccccattagttaagtttctggtctgctggtctttcccccagctatgcctgtgtctttcccactgatacacaaaggtgtaagctagtctcgttaaaactttcctagaattctcttcatttttctgtgaagcttctgtaatacacaccagtttggctaaaccgcttgtcggtaagggttcctaaacacacactttcccacatcctttgtcttctgccttctgttcttgagtttttaccaaaacatttcctacatgcatccaggcttttaatttggggtcgaggggagggacttttttattagatttttcttgcagctttattggggtataatttgcattctataggacccatgttggggtatacaagtcagtggtttctttcaaggactgcacatttaagtgaccacaccaacaagctaacttgaatggttttcccaggaatccccacgagtatttccagtctgagacaagcaagggaggctatgtctgaatatttgtcttccatagacaggtcatgtataaaccatgcatgctctcctctattgcatgtggcgtttttcacttcactatcatgcttttgtggttcatccaaatcgtaaaaagtatcagtattttgtttcctttggttcctaacagtatttattgtatggaatgaaatgtgtttcccttatataagaacctcagattgctttacatttggagatattttgggtaatgttccactagtaatgcatgaagaaccatttttactttatcttcctcaaagctttatgccatttattatatcttcttgtagttttaatctgaatttcttaatgaggataatgatggtcccttcatggtgtgctgattagcaatgtattttttcttcttcttcagtaaaatgtcccttcatataatttgtcaatcttcttactgaatgttttttgttattgaattatatggttttttttacatatactaatttgcaaaagttttcaaataagaaaacatgtagatatcatctctttatgatctacctattcatttctgtcttcccttgaagaaaaagcttttaacttttaataaagttcaccttataaaaaactttttctcttttatagctcatgctggagatactaaaaagaatgagcaaaatttagtttaaaatgtgaagaatttttcttcagacaatttagatagcataagacatttattttcagtcttgagaaaggataaaaatgttgaggaaacaacacacacattttcagaagtcaaagcataatttggtctaaaaaatccattaatataaagtgcaaagtgtttcttacagcaattgttaaatgttaagaaaatggttttttactcttgagattaaaaataagtttacatagcatgttttgaatattatacctattataatatttgttgtttatgcaaaaatatgttgaaatcatggaaattatttcttaaaattgtgtctcttcatttatttcattatttcttctcctacaaaacacatgaagtgcttttggtcctaaagcatccatatgctgaaaaaaaggaaacaggtgttttttaaaacaagtttttttagtgaagtgtaaaagtacgctttaggataaaaaaattctcagagtccttgtgagaccatgagagtcagcgtgtgctcaagagctgtggtgacagtggctctgaatttgcagcctgaagagaagatgactaggcaagactcaaacttttagaaggagcgattgctgtttattagaaagatatccaagtttaacgttccaactgtggtccagatagtaagagcacttgatcatatttaatggctttttaattatacaaaagatgttgagtatctgtgtgggctcactaaggtcttaatgatggggccctgatctggtgacttaatatatccccataagaaagagataccagacgtccccgtgcttgctttctgttcttgtttctgtctctggctgtttacatatatgcattagggaacaagcacataaagtggtgtgagagggcagcagtaagtaagctgggaagagtgtcctcaccagaatctgaattagtcattaatgtactgtggacatctaattcaacagccacgaggaaagcaagtacctgttacttcactgcttgtcatagctatttcactgtaggaaagctagctgttctgattacaaacttttttgaaaactacaagaaaaaaaaagtcaagaatgcctggaatgtttaagacaaacatccattctggttgagttttactgagtggatttgaaagagatgaacatctgggagctaagagcagcattgaactggagtttgtggtctgctgggtttgaatcttgaggtcctggtaggatgtcagccaataaagaaaatgttaatagtcttttttaaaactagctgcacaggtagtggatgaaggatacagcccaaagagttggaagcctttctaaaacagaggatacaaaaaaacccctagggagccagaaatgtatttcagaagcacaagaaaggtcagagatcacaggcctggtgtgttccactctgtaccatacgagttgcaaagaacataaacatgggagatgctagtagaagaagggattataaaacaaaaagcaaaaggaaacccaaaccaaaccagacaaataaaaccaagcaccatctgtgacgagcaacagacagttcagcacattatgaatggaaagaagtaatgtaagactgtgcacagtgtgagggacacacacttggttttagcaagtggcttattgcaaagatgttatttatttaatagctgttgatttccaagtccttcatttttagtgtctatgactatagattgcctgactctcaagcacattatgcaccccagaattttagcagaacacatacatgggaaaaaaactctagcttagactttaagtaagagcgattaatatatctttacaaatgtaagttcacatagaaaaatatgaaaaaatatagaaatatatagtgaagtgtattatacatatatagtgaagtatattaaataatactttttatatgaatataatgaagtatgttagtgaatactttacatatgattttctacatacaactttaacaccaattgtctgtaggtactcatatatagatacttatttaatttagttcattcttatatttttagttattaaatccctggagatcatttgtgagataataattattattaatatgattgccattgttcaaagtcaattatctgctaatatatatccagggattaaacttagagtaaagttgattcttgttctgccccctaaagagtttcagtgaggaatcttagcatggttggcatcacatggaagtcagcagtgtcctcaggacatttcataatacactaacaggagtttgcctgttcaggtttgatggacaagtaatgcatatgacagataagaagaggctttttaatatgttgttactcattttgttacaatatgaggactttgaggtgggagaattcactctagaactggttgaataagtagattgaataacgatttttagtaaattattttatatatggatagacattttatggatttaatacgtgtattggagttaaggtggtaaaattctgactattttaccacccacatacattttactttatgtataactgagcttaatatttctctacctaaatttaatcaacaagggctatggcagtaaagttagagaaaaattgaaaattatagagtgatagatattccagttacatctacttacacttcacagattatatagatttacgcccaaagttttttttctttttactatgcattttcaacattgatattggtttatagcaaatgaaaaggaaggaaattatacagcatttaatggcacatggccttgtcaatttaaaaaaatcaagctcacgaagaccagaaagctcatatttttctctatgatcttatacttgtaaagacttattaagggctcttacttaaatcttaagatagaggtttttacccatgtgtatgcgttctgctaaaattctgggatatgtaattgtgcttgagagtcaggcaatctctagtcacaagacacaaaaaagaaagcacttagaaatcaataattattaaataaatattaatttttttctgtgggactggtatatagttgagaacatatgaatataagatagaatttgcccactttaaatgtttaattcagttttaaaacatgctgggattttatgtatatgacaatgtacaaagttctactttgtaatacatttttgaaaaacatattttttttttggtctgagtgatgtttgatttttttccctttacaaactttggaacaatttttgttttccatttgctaatactagagactttatacttttgtgcaatatgaagctatactttaatgtgattagaaatacatttaaaataagaacaaaagcacatgaaacttaaaagtctagtgtgtgtgtgtgtgtgtgtgtgtgtgtgtgtgtgtgtgtgcttgagaagaatacatttcttcctaaagtttatcttaaacaggtcttataatttaggaaaaagctctaaaggtacattacaaacaagcaaaaaagcttggagagaaataatttcaggtttttttcattccagaagctataaaagaaaattactgccagtacttttaatgttgtttacttaagtggagatgtgccaaatgtagatgttatttacatctatggtgggggtagtcgcacttaaaaatttctcacttatatgttgttaaatatcaaccttgaatgtgaaataaaatgcagccaaatggagtgctgacaactgatttctcaagcagccacatgtatgcacttaagttatgtgcatccttcatcttatgggtataagggaacagtgaggaacaagataaatacaatttcatttttattagctgctgcatttgcaaaaagccataaaatgcatgacttcgttagctctaagaactgagcaattttttcttgcaggtacaagttcctgaccaattatgtgccattgaataaaattatgaaaggacatatgaagagtcttgtctcaaaaacagtagccatgcttctgagtttgttgacactggctgaatctgtctggtctgctaaatcatgagcaagtcagtgtgtgagtgagaaagcattcacatgcccgaaggtcaaaatttcacatgttaacccaatctaatttggtgtagttccaatacatctgtaagtttaaaagctgagattttattcaaagctatgtaataaagtatagtacagctttcccaagataattatcactatttgacaatatcctctttttggtaatttttaaagaaaaataatcaattagaaattttcttagttcaattatctcctaacccatgtaattagaatttctcattcttagaaaggagagttaggaagaatatttttcttcaggctcaaagtgttgattatagtgacacagcgtttgagtcatttaggaaggagcatctgcgcaggaataatgtatcggttttaatcacagacccaagtgcctaacagcaacaacaacaaaatactgttagcatcaagaaatgtttaaggcatattcaaatagccttttttccaaaaacttttgaaatgaagttgtattagttttgaagtcattacaagaccattttgattttaaaaatgaataacatgagtgtctaaacctttaattttcttaagaacacttaaagaacaatttgtgtgttatgttttcttttctttgttgtgaatgagccttcctttagaataataatgatcctaaatcactcaaagtaactttctgattttaagagacaacatgagacttatccaggccaagtaagttatgttatctctcaatttttaccattagtgccaactgtgtgtgtgtgcgtgtatgtatgtgtgtgtgtgtgtgtgtgtatgtatgtgtgtgtatgtgtgtgtgtgtatgtgtgtgtatgtgtgtgtgtatgtgtgtgtgtgtatgtgtgtgtgtatgtgtgtgtatgtgtgtatgtgtgtgtgtgtatgtgtgtgtgtgtgtgtatgtatgtatgtgtgtgtgtatatgtgtgtgtatgtgtgtgtttatgtgtgtgtgtatgtgtgtgtgtgtgtatgtgtgtgtatgtgtatgtgtgtgtgtgtgtgtatgtgtgtgtgtgtgtgtgtgtgtatgcctgcatgctgtgaatctgttctctccttctatcttagtgtggattcaaggaataaaagacaggtttactggaactatatggcaagtgcctttaccaaacgagctaccacattagttactacatttattttctattaacaaagagaatgataaaaccattattatatacacaactgctttcagggtgagaggagtctcacactgacatgtgctattaaaaaaaaccaaacaaacaagaaggaaacatcatgatcaggcaagagtggtgaaaatatcaagggatgctttatgacaatgcatgatcaatgctatatgataatgtatagtccaattccttgattgatactgtttctgtaatttattaatttgaccacctgaattttcatattatatatctcatagaacttttttctgtacaaaaataatattttgaaaaggaaaaatttttcttttaatatatatttagcaagtcaatattttccttttaaaataatgtttagcatgttaaaattttaatatatgctttaaagttaaatgagtgttttactccactgaacatagatgaatgaaatttttgctatttagaacatttcattcattctaggaaaaagctattcactgataagttataattaaaaagaataagtaagatatatttcaaaataccagatgaaaaaaatataatttcaaaatttacagagaacataactttttgttccaaagtgccaagaattgatttgctctttcactgatattgaagtcttggtagatattgataagcctcagtccttggaagtagatggcttactgttggtcacttatgtcataaatggactggcctagtacaattcagaaaggacttatatcaaactttacaagtataaattaatttatttttaatttttgcaatcagaataagtacagtcttttagcccttgggtcagcttgatgctatgcagctgtagtctttagaaatctctgacagtaccatgcatgagcaattcttaagacctctgcagttgtatttaccctggatttcagtactactgtggttagacaacaaaattgctttgactcagccactgagatggagagtcacgtatagggcatatgatggttagttttaatagttaaagacctaaatttacctgggagataggcttgagagcaggactgtgaggaaatctcctcactgcactgagatgggcaggcctagccactctgggtggtagcatcctctagccaggatcctggactctgtaagtggaacaaggaaactgaacagcagcatacattcattgctgccttcttccagattgtgagtgcaaggtggccagttgcttcaagcttctgccttgactctcttggcacaagatactgcattttttttatcagtaggtatatatatatatgtgtgtgtgtgtgtgtgtgtgtgtgtgtgtgtgtgtgtatagtattttcttcatttacatttccaatgctatcccaaaagtcccccactccgctactcacccactcccacttcttggctctgacgttcccctgtactggggcatataaagtttgcatgaccaatgggcctctctttccactaatggccaactaggctatcttctgatacatatgcagctagagacaggaactctgggggagtattggttagttcatattgtttttccagctatagggttgaagacctctttagctccttggttactttctctagctcctccattaggggccctgtgatctatccaatagctgactgtgagcacccacttctgtgtttgctaggccccggcatagcctcacaagagacagctatatctgggtcctttcagcaaaatcttgctagtgtatgcaatagtgtcagcgtttagaggctgattataggatggatatccgggtatggcagtctctagatggtccatcctttcatctcagctccaaactttgtctctgtaactccttcaatgggtgttttattcccaattctaagaagaggcaaagtgtccacattttgtcttccttcttcttgaatttcatgtgttttgcagattgtttcttttatcttgggtatcctaagtttctgggctaatatccacttatcagtgagtacatatcacgtgagtttgtgattgggttgcctcactcaggatgatgccctccaggtccatccatttgcctacgaattttataaattcattctttttaatagctgaatagtactccaatgtgtaaatgtaccacattttctgtatccattcctctgttgagggacatctgggttctttccagcttctggctattataaataaggctgctatgaacatagggagcatgtgtccttcttaccagttggaacatcttctggatatatgcccaggaaaggtattgctggatcctctggtagtactatgtccaattttctgaggaaccgccagactgatttccagattggctttacaagcttgcaatctcaccaaccatggaggagtgttcctctttctccacatcctcaccagcatctgctgtcacctgagtttttgatcttagccattctgactggtgtgaggtggaatctcagggttgttttgatttgcatttccctgatgattaaggatgctgaacagtttttcaggggcttctcagccattcagtattcctcaggtgagaattctttgtttagctctgagccccatttttaatggggttatttgattttctggagtccaccttcttgagttctttatatatattggatattgaataacaaaaaacctaggatagcaaaaactcttctcaatgataaaagaacctctgggggaatcaccatgcccgacctaaagctgtactacagagcaattgtgattaaaaactgcatggtactggtatagcgacagacaagtagaccaatagaatagagtcgaagacccagaaatgaacccacacacctatggtcacttgatctttgacaagggagctaaaactatccagtagaaaaaagacagtattttcaacaaatggtgctggcacaactggcggttatcatgcagaagaatgcaaattgatccattcttatctccttgtattaatatcaaatctaagaggatcaaggaactccacataaaaccagagacagtggaacttaaagaggagaaagtggggaaaagcctcgaagatatgggcacaggggaaaaattcctgaatagaacagcaatggcttgtgctgtaagattgagaatcgacaaatgggacctcataaaattgcaaagcttctgtaaggcaaaagacactgtcaataagacaaaaaggccaccaacagattgggaaaggatctttacctatcctaaatgagataggagactgcagtttttgagctgagtgccagaatatatacctttttctttaagttgctttcgtcagggtattttgctacagcaataggaaagtaactaagccagagccaatactgattccctaaacaatctttttccagttctttgtaggaagtagattgcttatgttctatctggagtcggtcaacacattttaaataccgttcatttgacccttggagcaggcatccatccaggaatcgtcaccctaatgaacaaaatctttgttagtataagataaatatagctgacatttctggtagcttgggagctatgcttcagatttttcaaatttagcagccctaccatgcatttatgtttctaattagcacacttcaaatgttaaacagtatttccctcatcctttgctcagatataaaacttttgaatctatatatctcattgtctatgccagaatatgttaagcaaattacatagttatgataagcataaacatttatctgtacatgtctttcgggaacttcattattactcttaatgaagaaaatcgaggccttgggttagttgctcttgtctgtttgatttcactttcatagatttaactcttatctaaatctttatgctattccagactgatacatagtattaccatacccctttacttttttgtgatgtaaaacagtgtttacaaaatgaactaatgtacaatttactaagtcctatgtcatatggatggagaagagagggaacagagagtctttcagagtaacaaattaattaacactgcaggtcatacttggggatctgaagagggacttcagcactgccaaacaaagcagagaatctgtctaaaaagtttcccaagaaaaagaaaggagccacagtaagatgcagcaggcttggctaatatagggcctatgctatgtgcctgtagtgaggttgcatcttcttgatgcacggaggcagagggatccggttcattatgagatcaatgggtggccctcagctctccacaggaacatttggaggccagagagaccttagcagtgtgactgtgtttatgaggactttgggcacagcacctgagtggtcttgaaattttagagtcttggttcggggaggggagggttgatctgggaggagggtaagaaagttgagagagctgagtatggccaagtggtgttctactccatgtctgaaaaggttgatgaataaattaataaacttatgggatgtacacttacatattatacttttagactgtgtgaatattggaaaacagcccaagactttatattaaaaaataatccctcttctgtttctaatgcatcctgcctgcagagctagataggatgatctgctgaaagatagccatttttctttgaggcatacattgcagatgtgtttgttgcctctttcccaatccttccttcccaatgaatcttagaaccttctgttttgttagtatcctaaagtgccagcctacacatttctttgtatttggttttctgctttttgtcagtaggttcttttacatatgcccgtatcaccctgcaaagcatctcatttgctcctgatgtctcttgccactctgaaaagagatggctcttctaaaagatttctcaggaaaataatgcatcataaccaaccttacaaatctacttctgatgggttctttccaaccttaagcattttagttagaacatcatttgcaactgtcagtggatatcagacaatcctaggtgggagggtggcatatgtattttgggagtcacatattccagtgcattcataggtgaaggctagatatctgtgtcagggtatcttctatcattctccattttacttccattgggggtgatgtgttttgtaaaaccaagaatatgttttgtagagtgtagtatggtagggtgaaaggaggtacctcaatggacccatgctaagacatccttccccactgagggaccaggcatacgactggtatagaatagaatagactttattttgtggcatgggaagcagagttgagaagggagtagaggcagcgaaatagagaaggagcagaatggggagagggaggaggagcagaaggaggagggagagggagaaaggtgtcagagagagcgaagagaggccaaacagtcctctttatagtaagcctggcctatctgaatgttgcaagaataactgttggtcaggacctaggaggaatgctaacaggaggaatttttaataggaataggactgagcaaatcacctatcacatattgagcagggtaggtacgtaaagttgttggaagagttgattcaccttacctaaatggtagaattgtgtaagtcagttgtatataaactttgttcatttatagttacgataacacggtctcatttcatcctccccttctgtgatgagctcttcttcaccttttttgttgcagttttctatcttttatttacttcagtgattcttttttctattgtttattttcaaatgtcctcaagctaggggcttactgctctgaggccttgaacttctaaaataagtcaccagtgctaaagccttcgcttttaactcagttgtgtcgcacaaggtttgacatacggtatttccattggcattgatttcagtacatcacttggctgtatgttgtctggtttttaagtgtaaagggaatttcctattacctttttgtaatttggtttaatttgtcatcatagactattctgacacaattcttttaagcttttgatgaatctttttaaattgtaagtttattttattgtattttatgggcactctgtctatctgtatgcctgatcaccacttgcatgtcctgtgcctgtggagtccagaaaagagcatcagatcccttgaactggagtcacagaccctgatcctctggaagagcaaccaatgctctcaactgatgagccatctcttcactatccccacacccatgcctttttcgtaagacacagtttattccactgtggttttgtgagcagttgaacactgcatttttctgtcattaggcaaagggttatttctgtggacattggattctgtagttgacagcattgctgagtaactctgtgattcaactgataacctgtctagcactttgatcggttgttgagaggggttgatgtagtttccaggtgcagccgtgacttctgttttctcctctcagttatcacggggagtttttggcctctgtggtttggtaagtacattccgagcaccataatatctccttagtaaaacgactcacttaccatcctgttctttttattcctttgtctgtattagatatttctgctgcaaagtttactttaacatatataaatttctactttctttgagaaatgtttgtttggcatatcttttccaagacttcttttttgaattttttggtactattatagttggagcaagcttcctgggacaccttagggagagataacagatgggacccctggtacttcacaaacactaccctaggatctttagagtacagtatttttggtctatgaaagcctgtacttgcactgtttggtacatagatgctttgctgacaaaattcctgctttttcaccagacatcaccccagtggagggaggaggaatagttgaatgctttatggtgggaatgagagtccaagatctcattgtggttttcacacagggttgtggaaattagtagtgccttagtaagatggaagtcccagtgctgaactttactctttctgatacaatctgagcaaacctcaggagtgagacagtgtgcaggtcttgaattagaaggtacccagcgtatctactcctctttgttgatgtatgaaacacagccagttttctatgacatttggctgcagtaagtagtatggccattgtatacttattgcttcctaatctttcagctagagccaagagacttttcataaggattttgttttgtttagagacagctattgttatgttgccaagatcagacccccatcattttattaatacttaactaagggtgtacttatactcaaggttttctaactcagtatattgaggactaagattgtataagcaaatgaaacttgaacatatttcaactgtacccatttggcatttctagattatataagcatgtgaagtttgaacatattttagttgtacccatttggcatttctaggttgttagcttttttggcttcagctctggaatatctgaggaaagtaaaatgtaatgaatgtctatcttttcagaggcagaaacatttttataagatttttgtagcaaatgtaagatttatatgtctggaattcaatagtcacgtaagtttatgcactaacacctgacaaatgctaagagaggcttctctgaccaaagcagagagcagcaataatgtatgtgtaaaagcacaaatattgaaaaagaaatatggcatcatgtgcctttagcaaatcagcagtcctaggttccatctaggacctattaactgcctagtcatgggcttttgactaggttgacaggatgagtcatgaattctttccagtgaagagggcatcagagccaatcaatcaaaaagtgattggttaccccataatggtcacagcaccattatacccatgagtgtttcatgcctggcaggtggttacttaactcataagattcatatctagatcagattgacgacaacttttctcacccaggaactttcctagcacctttgggccctgtgaaagccagccagtaaggtggaagtatgaagttcaggtccagcctgagttctctatgtcctggaactgtgtgtgccattagtgacagcgtctcaccatctagttcttgtgggcagtcaagaacaatggtagtatctcagactgtttgggagacctctaggaccttcagatccttgaccaacaagtcgcctcttgccttgggatttttatttgataactcatgggttctgtaaacaccattatccctctgtctttgtgccaccattgcactagcataccttgcaggtaggacactattattaactgaaaggtttgcagcagagttgagtttatcattttcctttggtagagtgcaaaggaaaaaaaagtcctctactaagaatctactagttcttagggggtgaaggctctaggatggcaccagctcaacttgtctgtgttctcaatgagttgtgtaggtactgtcttcagctgacagtttgtggagagcaaccttggtaacagcacaagttgtttggagattcccataacattcctttggacagcaactcaattagaaaaacccatttaccatactggaagtttcatttggtgacaagaaatttccatttgggccttatttgggggtatcatttagatttccttcatatatgcatatattaggaagtgtctactaaatcagggtcccattcaaatgaccctcaattttagctgttttcaccatgtttttctcctctgtcctcttccagtttgattcagctgtcccttgtttatccatagagtttttttttttccatttttatggagctctccatttctcctcttactcaatccctaacctttgtgcttctctaaattgtagcatttttatcactgacttaacaatgttcatcttgcctaagaaagtcacagccactacaacagtttgatattatgctggattattcactttcattattatatgaaacaaacttaagcataattaataatatttactaagccccaaataagtgctgaatgagttctatgcattacggttatcatttgactctcaaaacaagtgtttgttataatactatttttctcatataatgtaaagaaaaccaagacactaactgcatttaacaggtgaaaaattcacctgagatcaataatagcataggtattgtcttcacccaacagtttgtggagagaaacctctaggctggcaacaaacagccccagttgtttggggattcccaaatggagattctatatttgaacctggctgagagtaggcaccctgctagtccttatttcctctttccttcccttcttttctctcttctttccttcctttttgtacaagggattaaacctccatccttatacatagtgaacacaattcctatgaaacccacaaccccatgagaagacattcttacctatgaaattattctacttaagctcaagacagcatgaaaaaagtcccttctggttggtctctgtgtccctgtttctctgttatttttctcagtgggtatggtcatccattctaaaagctcattctgtactcttacacttagcagtggacttcctgtctttagtattttaaataaaatacacatctgtctttccatatggcaatgcaaaattttatagatgcagtgtggtttaatttacataatgaaatacttaaatacatttctgcatttttggctgaccaactgtcttctgccctctaactctaccaccctgtctacagcactttcagataaaggcaatattacactgttctctggaaggttaattgtagccacttcattgaatgttggacattgagtggtaaaggggttcaatgcgtgaagtgtctctgcatgctgttgaaataaaagaaatatttaatttcttccttgtttatttcttctagcttaaatgtagatgttgtaatgggaactttggggtcattttagaatctgtaagagggagaagagacaagacagcaaataagaaacagttggtcttataaagatgccacataaacatatgcttcttcttcccactgatttgttacctctgagagtgtaatagattttcttatttgggtccagcaagattgtttagtttgtaaaaacgtgcaccacttgacttgattgatgtcaaggattgaaggaaggaactaactcccacaaattacactcacattgtcaacatggaatatttatgtccagtatacatacatacatatacacaggacaaaattaataaacatacaataaaaagttcgtgtttaaggagctgttcttttggatttgttttatcagttgaatgaacagttgtagagtaggtttgataatcagtgcttctatccatcattttctatcccataggtattaggacaaaaaaattgcttggctaaacactgcaatcaaatcacttattggctcagagttttatcaagaatgacagtgtttattcagctatttttttcctggaaaaagaaagaaattatcagaaagcagtgatcatagctcactttctatacacagaaaactactttctccccttctacccccacccttggatactaacaaacaaaacaaaggtaaaagaaaaaaaaattagttgcagctaaagtctacctggtatcaatgtcttctagttttgttattttatttttaaattttcacattctatgacactcaaacacacatatacaacctcctgaaaatatgcctctcaaagtacaggcagccaactctgccctatagaaaaaaaaatccccaaaccaggctacaggatcccactaatacatgactttgccccaaatttgggccatagattcccatcaaaacaggctaccctggaaagctccacccacaggaaaccctacataaagcctgcatcgtgctcagttctttgatacttcttacccaagcagaggcagccatcctctgtgtctttcccaataaatatattacgtgatgtttgttgtgcagcataactatgtggtattccttagctccctattgccagaatacagttcctttcagagacgcaccacttgctctgggaaccctttccccgcagagctttaacactgacagagtcatttagtgttgtgcctgggtacatccttagggatgaccatttaggatggaataacctaccaaggagctattttctagagaagattgattctccctctctcagcagtccctgattctctgtaggtcttcatctaggtcttgggcatgcgaaactttccttatcaatgatggtatgctcaccaatgtcatcactctgcaggtattgtttaagcaaccacattgttgggatttaataagtgtagcttccctgttatgtagagaagacactataagcaggtatccttgtactctggctcttacaatcattcttcttcctcttacataatgtttatgagcattaactgtaaagactgtaacataggtgtaccacctgaggctaggcatagcacagtcacttatgttctgcactttgaacaggtattgatatctgtaatagttctcatctgctacacgatgaaggatgtttggtgaagactgaggtcttaacttattgtggatatagtgataagaaattataatatagttagaagttatattagcttaggaaaatagcaatagtagattctccacgcctttaatcccagcacttgggaagcagaggcaggcagatttctaagttcaaggccagcctggtctacaaagtgagttccaggagagccagggctatacagaaaaaccctgtctcgaaaaaccaaaaaaaaaaaaaagtttaaaggggaaggagggaagcaaatggcttagtaggcaaagttatcagctaacctttaagcaaattggtgctgagaaaggtaagtgtggtggtgtatgggtggtgaacaggataatttcagaatattgagataacagaatatgagtattataatcaaacgtttttgcttattggtagcattcttcagtgtcagtcacaaaaaccacagtgaggtaatatgtagggaccggaagggctatccagtggtcagctctgacccaactcattctaaacataacttttcatgttgacctttgatttgatgggtcctacagaaagctttgtggaatcttttaagattagcaaaccttataaaattcagaaagtcagaaacctcataacattcagaacacacagaacaaaacagggtatattgtcagtatgtccttaagtcaagtcacttctctgtgtcagagactggcagctatgttacagcagcaatataaaatagctagcaggcatggaacaatattgctacaactattctgagggtgtgtgtgtgtgtgtgtgtgtgtgtgtgtgtgtgtgtgtgtgacagaccataccttcatgaggtttgtccatgatcattatggaaggaggcaaacagtgtatggtgctagagcagtaactgagagctttatatcctgagactcaggcagaggagacagacagaaacagagtgaccgagagacagacacagagagaaagactggacttagtgtaagctgttaaaaacttgaaacccgctccttacgacacacttcctccaacacagccacatctaattcttcccaagctataattgattttaatttttctgatgtagtgatgagatgagagctgtactcaagttgtacagatacatgacttgggccaagcccagagcatttccttctctgctctaactattccaaggcctaggcctggaagcttcttgcctatacacagtctaattttccaagctgactgattcaatctagactctctcagcttctgactgaatcgctctgcctggcctcatattaacttcgtgaatacattttactcttctggctccttctcattctcttgctcattctgtctttacctgtgtctatcttgttctctctgtaacctgtctctgtaaaactgtccccgttaaaactgacaaaccaacctccctctgctcttaagtcgcctctttcctgtgctgttctcatatgagttgggcctatcttatcagtgactcagtctgtgaaatctttccctgatttgtcacattgtctgcccctccattagacatcattttaaacattggtgcttccctctaaaatgaagcatatctttattgtttgggattaaaggtgtctactaatggtgtgtctatattctagccagattattctgtaattaagggcttatctgcattccagccagatcacacagaccttggtctttgtatgtgactccttgccggaacaaccatgttgctggattaaaattcctctaaaccaagcattttgactccccagtgtctaagcacacaaatatagtttataagagctattctcgctcaagctaccatggttagattactgatttctcttcctaggcaacttgcgcactatcttctgaaaccatcagatacagtcctcagggagtaggtttccagatcagtcccagttcgcttccttcatgttctgtgtttaaattatgtgatttcttaattaataggatattaccctcaagttttaggaggaaattgtggacaatggcaaaattttatattgtttttgaagtctcttagactcccctgaccaactaaattgaagtgagggttattttgcttcccactgcaattctgttagacagtcatgctatgtagtgtaattccattaaatatacatatacatgtgtgtttatccattatatataacaattctatagattctttaatagtaccaaagagtcaattggtgtttcactttctttatataaatttcttgcttttattcttaaattatatttttatgtgtatgggtgtttttgcctccatgtatgtctgtgaatcacctgtgccctggtgctcacgaaatccaaaataaaggtttttagatcctctgtaactgaagttatagacttttgtgagttaccaggaattgaaactgagtcttctgcaagagcagccattactcctaattgttgtatcatctctccaaatccccaattctttgccttaaagaacaataaaaaagtccacaaacatatattgtatgtatgttttaagtatgattattaaataatccattttcctatggccttttaaagtttccttagcattatttatcttttttccttcttccttctcctgcatcaagaaccttcccccttccttatattaatgtttccctttgttttctactttgactttttccttgtacatttgtgtgcttccatttccagctttcaatgatgttaaggtttttgtttgttttttttaatagattctttgttcttgtttctatcatctatctatctatctatctatctatctatctgtctgtctgtctgtctgtctgtctgtctgtctatctatctatctgtctatctatcgcattggactttatattcagaattagaaggtattagctcttccttgatagaaactttaataagagtaaatactgacaattcctccatatttaacctatctgctcaatttggtatgagtttttccttattattaaaaaaatttgatagaatatggagaaagaaggatctcttacgaaagggcaatttaccatttagtatatgatttaaaatgttgatgtatgtttttcagccaggtgttgcagcctagcccttaattccagctacaattgaagttatagcaaacaaacaaacaaaccaaccaaaccaaaccaaaacaacaacaacaacaacaacaacacactgtaacttcaaaagtaacctgaacagaatagtgggactctgtctcataaaaacgcatttttaatttctaacaaattttaacatcaagtttaaaaagcgtttaaaatatcattgtctttctgggagtctgttgtgaatgactagtccttttgaaaaccaaacccaaacattccataactggcattagatcgataaagcaatagttttcatgaagttaaaaacatcattctaacatacacataaaatgtgtgcctggagaagtttaactaatgagagagcgagtgagatgctaaagccagctcagcattgaggttgtagcaggtgttactctcagcactgagccacaacttcccaatttatcggggaaagataaattctaggacattcttcttcatgacctaggttttacttctcacataagaaacggcttgtaatacaaaaactttgatctccaaaccattgttttgtttttgtttttcctgatgtgatacaaagaactgactttgaaagtaaaaactggtacattatatttggttttctttctcattgtaattgagaaattgttttccaatgttctttttagccttgtaagaaatccctttatgtacatattgctaaaccataccatgtagtaatcatacagtttttattcttatgttcacatataaagattttggtaattgtaaaaaatattcctttttctttcaaaaactatgttttcacgattattattttctaacattcagaaaatttgagtttcacaaccaaagaatgacaaaaacttctcttacctttcccgagtgtataagcctcatgcatcaacagtagaatgtctgtagaacagtcaaccttcctagtgctgtgaccctttaatgcagtttctcatgttgtggtgaacctccaaccataaaattattttcattgctcctatataactaattttgctactgttgtgagttgtaatgtaactgtctgatatgcaggatatctgaattacaacccctgtgaaaaggatcaatccatcaacaacagggttatgacccacaggttgagaacccctgaagtagagcaagcatttgatgagatattgaattcctaacttactaggtggttttcagttattctactgtcttttactataggaattttgctgtctgtttatatattagttacatttttccttgccacccgtccaaaggcagttttatggaggaaagctttattttaggggaatacatgggaaggcaaggcaacagtggcgactttgggtgcccagttagctttctcgatataaaaacaaattcccctgggaccagcctcacttgatagtgctccctacattcatggagagtctttccttctcaggtatgaatttctgaaaatgccatcaaaaatataccaagaattgtgtctcctaaacaattccagattctccaagtggacaatgaaagttaaccatctcagcttgcaaagaaaactatggctgacttgagatggtcaaacattcttaacatgtcttttgaacttcctttcttgatccttaggcacacatatttctgaaatgcaagatgccacaatattttacaactcaaagggagccttcatatttataaaagacatggtgccattcagagccaccaaactgaacaatcgccaatgggtttgacaactttccttttgagactagacaatggatggttgtcttgtttaaaggtttcaaagtctctacactgaagagttaacatcattgttttctatataatcttaagggctaaaagattttatgtgtctatcctgtaggaacataagtgattcttaataaaatgaaaaatattttagcagtgaaaattaccaagtcatctttaattaatacctgtttaagtctttaaaacaaatggaatttttcagaacatatccagagatagttcaaactatcactcatgagagctgctgtgtagagtcagtcatggcagtccataacatgaggttgtgtctgagttccaggctcacacaagagatgtaaagattcaacagattttttaggttcaatttcattctatagggaactttaggctatataaatttgtaatcattataaaggtagatttttatgccttagtgtagacaccttccctcaaataaatgaactgtgggtgactgtactcctttgctgcctttcttctgttaaagagtttgctaacaaattagctcaaggataaaatgtttagaagtaaataacattcaaacggggttaaaggaagcagcttaagtgagagaacaagagtgtctggagataaattatccttgtaagccagctttaaatgatggagggtccccaggaactttatgtggaagttgattattaagtcatatccgagtccattggaaatgtgtttgaaactgatagaatatactacagatgtttgtcatcttgctcatagagaatgctggccaaggctaagctcttcagctaaaactcacaaaattcatgtagggatttaacatgctcatggctaggtagatacagtaactcatagcatcccaggtccactgtgcccaagcacttgtccagttcaactcagaagagaataatgtaggaattagaatcttactataacagtttgcagttagaactattactgttaaattgattagagtgtgtacccaagtgctggtaccatcaatagagtaaagtagttaagtttaacaataccaataaactctctgtgtatgagacatttttgtttacccttgaaccacttgaggctacttctgcatctgtttggctgtggtcatatgtttcaatgtaatactcattaaatgcttctgcgtagtgatgaccttatttgttttgttattctagtacgcagtacactgatattttgataagtttacgagtaaaatgaatgatcaaatattaaggaaaaaacacaaaatactaaattctattatttagtacaatgaaactggccttcaaaatgctggtaaaaatttttaaaaactttactcttgatttctatacaataattcaaagtgtaataggtaattaagtactttattaatgataacaactttagggaaatctataacatggtaaagctttacttatataaagctttttatagtgcacctgaggccctggatagtcagcccagccattatattcccattcattaagtgggaagtaaagaacagctttacaactttaggtacatagtagctttacttaatgtctcagttataaaacatacgcaggcttttaaaagtaaaaacattcatttgatatcaaatccttactaaaaaaaaacaataaaccaactcctaacaattttattattatttttcatgtcatcctgttgcttgacatttggataaaaggtagggatatttgatcaacaatagtatgaggagatgaagaagaactatgtgtctgtcccattatcatagactaggaaaggctttggagctgcataggagaaatgttcatttcatacaaggataccagccccttaccgcatccttttgctctggcaatcattgacaccaaactcttaaagattacatcagtaataatgagtatgtgcagaacattatagcacaatattaaaaactaggttaaactaatcgacgttggcatttaagacactgaattatttctcctcaagaataaaatcctaggaagcaacaattacttttccttaatatctcttaacatcaatggtctcaactcgccaataaaaagacatagactaacaaactggctacacaaacaagacccaacattttgctgcttacaggaaactcatctcagagaaaaagatagacactacctcagaatgaaaggctggaaaacaattttccaagcaaatggtatgaagaaacaagcaggagtagccatcctaatatctgataagattgacttccaacccaaagtcatcaaaaaagacaaggagggacacttcattctcatcaaaggtaaaatcctccaagaggaactctcaattctgaatatctatgctccaaatacaagagcagccacattcactaaagaaactttagtaaagctcaaagcacacattgcacctcacacaataatagtgggagacttcaacacaccactttcaccaatggacagatcatggaaacagaaactaaacagggacacactgaaactaacagaagtgatgaaacaaatggatctgacagatatctacagaacattttatcctaaaacaaaaggatataccttcttctcagcacctcatggtaccttctccaaaattgaccacataataggtcacaaatcaggcctcaacagattcaaaaatattgaaattgtcccatgtatcctatcagatcaccatgcactaaggctgatcttcaataacaaaataaataacagaaagccaacattcacatggaaactgaacaacactcttctcaatgataccttggtcaaggaaggaataaagaaagaaattaaagactttttagagtttaatgaaaatgaagccacaacgtacccaaacctttgggacacaatgaaagcatttctaagagggaaactcatagctctgagtgccttcaagaaaaaacgggagagagcacatactagcagcttgacaacacatctaaaagctctagaaaaaaaggaagcaaattcacccaagaggagtagacggcaggaaataatcaaactcaggggtgaaatcaaccaagtggaaacaagaagaactattcaaagaattaaccaaacgaggagttggttctttgagaaaatcaacaagatagataaacccttagctacactcactaaagggcacagggacaaaatcctaattaacaaaatcagaaatgaaaagggagacataacaacagatcctgaagaaatccaaaacaccatcagatccttctacaaaaggctatactcaacaaaactggaaaacctggacgaaatggacaaatttctggacagataccaggtaccaaagttgaatcaggatcaagttgaccttctaaacagtcccatatcccctaaagaaatagaagcagttattaatagtctcccagccaaaaaaagcccaggaccagacgggtttagtgcagagttctatcagaccttcaaagaagatctaactccagttctgcacaaactttttcacaagatagaagtagaaggtattctacccaactcattttatgaagccactattactctgatacctaaaccacagaaagatccaacaaagatagagaacttcagaccaatttctcttatgaacatcgatgcaaaaattcttaataaaattctcgctaaccgaatccaagaacacattaaagcaatcatccatcctgaccaagtaggttttattccagggatgcagggatggtttaatatacgaaaatccatcaatgtaatccattatataaacaaactcaaagacaaaaaccacatgatcatctcgttagatgcagaaaaagcatttgacaagatccaacacccattcatgataaaagttctggaaagatcaggaattcaaggccaatacctaaacatgataaaagcaatctacagcaaaccagtagccaacatcaaagtaaatggagagaagctggaagcaatcccactaaaatcagggactagacaaggctgcccactttctccctaccttttcaacatagtacttgaagtattagccagagcaattcgacaacaaaaggagatcaaggggatacaaattggaaaagaggaagtcaaaatatcactttttgcagatgatatgatagtatatataagtgaccctaaaaattccaacagagaactcctaaacctgataaacagcttcagtgaagtagctggatataaaattaactcaaacaagtcaatggcctttctctacacaaagaataaacaggctgagaaagaaattagggaaacaacacccttctcaatagccacaaataatataaaatatctcggtgtgactctaacgaaggaagtgaaagatctgtatgataaaaacttcaagtccctgaagaaagaaattaaagaagatctcagaagatggaaagatctcccatgctcatggattggcaggaccaacattgtaaaaatggcnnnnnnnnnnnnnnnnnnnnnnnnnnnnnnnnnnnnnnnnnnnnnnnnnnnnnnnnnnnnnnnnnnnnnnnnnnnnnnnnnnnnnnnnnnnnnnnnnnnnnnnnnnnnnnnnnnnnnnnnnnnnnnnnnnnnnnnnnnnnnnnnnnnnnnnnnnnnnnnnnnnnnnnnnnnnnnnnnnnnnnnnnnnnnnnnnnnnnnnnnnnnnnnnnnnnnnnnnnnnnnnnnnnnnnnnnnnnnnnnnnnnnnnnnnnnnnnnnnnnnnnnnnnnnnnnnnnnnnnnnnnnnnnnnnnnnnnnnnnnnnnnnnnnnnnnnnnnnnnnnnnnnnnnnnnnnnnnnnnnnnnnnnnnnnnnnnnnnnnnnnnnnnnnnnnnnnnnnnnnnnnnnnnnnnnnnnnnnnnnnnnnnnnnnnnnnnnnnnnnnnnnnnnnnnnnnnnnnnnnnnnnnnnnnnnnnnnnnnnnnnnnnnnnnnnnnnnnnnnnnnnnnnnnnnnnnnnnnnnnnnnnnnnnnnnnnnnnnnnnnnnnnnnnnnnnnnnnnnnnnnnnnnnnnnnnnnnnnnnnnnnnnnnnnnnnnnnnnnnnnnnnnnnnnnnnnnnnnnnnnnnnnnnnnnnnnnnnnnnnnnnnnnnnnnnnnnnnnnnnnnnnnnnnnnnnnnnnnnnnnnnnnnnnnnnnnnnnnnnnnnnnnnnnnnnnnnnnnnnnnnnnnnnnnnnnnnnnnnnnnnnnnnnnnnnnnnnnnnnnnnnnnnnnnnnnnnnnnnnnnnnnnnnnnnnnnnnnnnnnnnnnnnnnnnnnnnnnnnnnnnnnnnnnnnnnnnnnnnnnnnnnnnnnnnnnnnnnnnnnnnnnnnnnnnnnnnnnnnnnnnnnnnnnnnnnnnnnnnnnnnnnnnnnnnnnnnnnnnnnnnnnnnnnnnnnnnnnnnnnnnnnnnnnnnnnnnnnnnnnnnnnnnnnnnnnnnnnnnnnnnnnnnnnnnnnnnnnnnnnnnnnnnnnnnnnnnnnnnnnnnnnnnnnnnnnnnnnnnnnnnnnnnnnnnnnnnnnnnnnnnnnnnnnnnnnnnnnnnnnnnnnnnnnnnnnnnnnnnnnnnnnnnnnnnnnnnnnnnnnnnnnnnnnnnnnnnnnnnnnnnnnnnnnnnnnnnnnnnnnnnnnnnnnnnnnnnnnnnnnnnnnnnnnnnnnnnnnnnnnnnnnnnnnnnnnnnnnnnnnnnnnnnnnnnnnnnnnnnnnnnnnnnnnnnnnnnnnnnnnnnnnnnnnnnnnnnnnnnnnnnnnnnnnnnnnnnnnnnnnnnnnnnnnnnnnnnnnnnnnnnnnnnnnnnnnnnnnnnnnnnnnnnnnnnnnnnnnnnnnnnnnnnnnnnnnnnnnnnnnnnnnnnnnnnnnnnnnnnnnnnnnnnnnnnnnnnnnnnnnnnnnnnnnnnnnnnnnnnnnnnnnnnnnnnnnnnnnnnnnnnnnnnnnnnnnnnnnnnnnnnnnnnnnnnnnnnnnnnnnnnnnnnnnnnnnnnnnnnnnnnnnnnnnnnnnnnnnnnnnnnnnnnnnnnnnnnnnnnnnnnnnnnnnnnnnnnnnnnnnnnnnnnnnnnnnnnnnnnnnnnnnnnnnnnnnnnnnnnnnnnnnnnnnnnnnnnnnnnnnnnnnnnnnnnnnnnnnnnnnnnnnnnnnnnnnnnnnnnnnnnnnnnnnnnnnnnnnnnnnnnnnnnnnnnnnnnnnnnnnnnnnnnnnnnaaaaaaaaaaaaaaaaaaaaaaaaaaaaaaaaaagaataaaatccttatgattgaatttttatcactcagagtagttgtaaagtacagctcttctctctctctctcttttattcaaaatagacttttttctcatctaatatattccaaccacattatcccctttcttgtgccatcccagctcctatccccaacttccctctccccaagatcctttccctatataattcccttcagaaaagagcaggtctataagaggcaacactgaaacaggacaaagcaagatacaagacaaggtaaaagcccctttatggcggctaattaaggcaacccactaggaagaaagggtcccaagagcagaataaagagtcagagacacatattttaatttcctttttcttctttctctctgtctctctctctctctccctccctccctctctctctctctctctctctctctccattgtttcagttctttccaatctataaggactttcattgattttgtttgttcagattttattttatttgaaatacagtatcagtatgtagccttggctggcctggaacttgttatgttaccagggacctttcctgcccttcaaaggtactgagaagtgacacagcaaaggatgaaggccaaaggctgatgatctctggtctttataactctcgcttactgttctgggggcccaagctgatggcctctggaaatttaactttctcctgctattctgtgactaaaagccactgacttctggcaattaactcctgcttataagatgcaggggattaaggaaagaagctaattacctgagtgttgggaattggatttaatgctttgtcttattttggatcccaaaaagccatgcttccttacctgagggtccctgcccccagctggcttcaatggataataaagaactgtcaatcagccattggctgggcaacgatacatgactcagagagaaaaggatcagatttaagagctgcaggagagaaaccatccagcaatgtaggtgggaagggaatgcagacctatggggagaggctccccagaaggtaatgggtagcagacatgaaatatagagtttggaaggtgttaagccaggaatactggagggaaatgtatgctagtcaaggggagaattagaaatgctgagccatacacattccaagtcatataaaaattaatcctgcatgtgtgtgtctttcatttgtgaatccagagggctcttgtaggtggctggcagcgtgacctgccggaagcataaaacaagtttaactagttcatcactacacttgggatcttttttctctagatctagggtcccttgatggccaggcaagaggcttggagttagttaactacagagagaaaagaaaaggaaaaagaaagaacagaggcacacatactggataaagttgaagaaagccacagcatcattttattgcggttcttagtttttatagtttctcaggataattaaattaattacatggctttctaagcattttacatgccataagttcatataagtttaaagcaataactcatgccttaaataaaatttaaggacttataacagaattgtttatatgtctttccattaagagtaatatttcactaaacattatttgttactatcccccattagttcttcatcagtttcaagcaataattttcatgtcacatgttggcctagttttttcagaagacaaatcatttacattatgtcttattagttttgaagttttgcatagataagctagtcaatattttattttctgtccttgtacctaaaataaattgtccattaccagtttatgatctttagttaccagatactgatctcacacctaacctagaaggaatgtttactttgcttgtaaatttgtttcaagtctgctttctttccctagtgaaattagcccatgacacaggaagatttacaaagctatatttacagcttttattttatagggggcatgaaattacctgtataaatttaggaattctataaaatcattatcagaaattataaaatcatccatttatctatacaacattactacatgagaatatatcttcatgttgatctgcagaagatctgcccaagagagcaggctaaatgccctggaatgattaggctgtgtaatagtggcatgaaaggcatatcagcttaataaagcagtcctgggattaagttactaaggaccctgcaactcagaactcacccatcatagtccatgcaaaatggtccagaaaattcacttgtatgctttagcctttcctcgatggctttggacactatatagaacagagtggcctctcagcctcctgagtgctgagagtaaaggtgtataccaccacacctagccccaaatacagattttcaaagcctcacctacatacactgcaatgtctttcatactctcatttttaggcttgacttcttagatattttaattcctaattaacgagaagaagcctatcttcttcacatccatagagatcttcctcagattcttttgagtacagccatcattaattttactactcttttgattgacatgttgggatgagcaaagcaggaacctgaaagatcagttctcataaacaatcagggtcttctaaaaattccaccagagaactcctaagcctgataaacagcttcaatgaagtagccggatatagaattaactcaaacaagtcaatggcctttctgtacacaaaggataaacaggctgagatagaaattagggaaacaacacccttctcaataattacaaataatataaaataccttggtgtgactctaactaaggaagtgaaagatctgtatgataagaacttcaagtctctgaagaaagaaattaaagaagatctcagaagatggaaagatctcccatgctcatggattggcaggatcaatatagtaaaaatggctatcttgccaaaagcaatctatagattcaatgcaatccccatcaaaattccaactcaattcttcaatgaattagaaagggcaatcggcagattcatctggaataacaaaaaacctaggatagcaaaaactcttctcaaggataaaagaacctctggtggaatcaccatgcccaagctaaagctgtactacagagcaattgtgataaaaactgcatggtactggtatagtgacagacaagtagaccaatggaacagaattgaagacccagagatgaacccacacacctatggtcacttgatctttgacaagggagctaaaagcatccagtggaaaaaagacagtgttttcaacaaatggtgctggcacaactggcagttatcatgtagaagattgcgaattgatccattcctatctccttgtattaaggtcaaatctaagtggattaaggaacgccacataaaaccagagacactgaaacttatagaggagaaagtagggaaaagcctcgaagatatgggtacaggggaaaaattcctgaatagaacagcaatggcttgtgctgtaagatcgagaatccataaatgggacctcataaaattgcaaagattctgcaaggcaaaagacactgtcaataagacaaaaagaccaccaacagattgggaaaggatctttacctatcccaaatcggataggggactaatatccaatatatataaagaactcaagaaggtagactccagaaaatcaaataaccccattaaaaatggggctcagagctgaacaaagaattctcacctgaggaataccgaatggcagagaagcacctgaaaaaatgttcaacatccttaatcatcagggaaatgcaaatcaaaacaaccctgagattccacctcacaccagtcaaaatggctaagataaaaaattcaggtgacagcagatgctggcgagcatgtggagaaagaggaacactcctccattgttggtgagattgcaagcttgtacaaccactctggaaatcagtctggtgactcctcagaaaattggacatagtactactggaggatcccgcaacacctctcctgtgcatatatccagaagatgtcccaactggtaagaaggacacatgctccactatgttcatagcagccttatttataatagccagaagctggaaagaacccagatgcccctcagcagaggaatggatacagaaaatgtggtacatttacacaatggagtactactcagctattaaaaagaatgaatttatgaaattcctaggcaaatggatggacctggagggcatcatcctgagtgaggtaacccaatcacaaaggaactcgcacaatatgtactcactgttaagtggatattagcccagaaacttaggatacccaagatataagatacaatttgctaaacacatgaaactcaagaagaatgaagaccaaagtgtggacactttgccccttcttggaatttagaacaaaacacccatggaaggagttagagagacaaaatttggagctgtgacaaaaggatggaccatctagtgattgccatatcccgggatccatcacataatcagcttccgaaagctgacaccattgcatacactagcaagattttgctgaaaggacccagatatagctgtcttttgtgagactatgctggggcctagaaaacacagaagtggatgatcacagtcagctattggatggatcacagggcccccaatggaggagctagagaaagtacccaaggagctaaagggaactgcaaccctttaggtggaacaacattatgaactaaccagtaccccggagctcttgtctctagctgcatatgtatcaaaagatggcctagttggccatcactggaaagagaggcccattgaacttgcaaactttatatgtcctagtacaggggaatgccagggccaaaaagggggagtgggtggacaggggagtgggagtgggtgggtatgggggacttttgggatagtattggaaatgtaaatgaggaaaatacctaataaaaaaattataataaaaaatcagggtcttaccctactgctagttaagtgacaggcttgctaatccatgtgcccagtgatcctaaccttgagtttgaacagcatgttcatctagttttaggtatatctttagatggtggagaagaatttgtcttggtcttgtagtagatagggacatctctttatagaagccctggcatgcaaatgtctactccagttatgggtccttccagctttattccagtaataaactatatagaaaggctgagcagctctctctgatggtatctttaatgttttatcaactaccatgtttagggatatgattctaatataataatttcacatttaaaggcttcctttatggtcaggctattttctgatgataatatatactatgcctgagcagagaatcaccaacctatttacaagaagcaaaggtatgatggttggtataactctctagacattctcacatgctactttaaataccataggcaactgctagcaactatattttaaaagtaagacttcctaactcatccccgtctgtaacaaatcttcatatgatcgccactgtaaagtccagcatatagagttgccaaatataaaggaaagtaccaaccatgcatggtggtacatacctgttttcccagtgattcaagaggcggaggatacatgttctagaacaacttaggcaattttgtgagaccttgtatcaaaataaaaagtgagaaaggagatggcaatgaagcccagctgttgaatgattatctaatatgtataaggccatacgcccaaccccttgtacctaatatagaaaactataaatagaaatcacattgaagaaccacctgcccagtacattcttcagagtattcagacggcagccagacaatctgacatgtgcttatcattttgacagtaaatacacagataaaaaatacaactcacacagaatcttgactagaacatgctcatgtaaaaaagacattgatgcatttccaataacttttcctttatagtaaagattagtaatgaaaacattcactagggatatagtaatgggacaaaactatatattagctgtgtgggtagaacagtgggagagtttgtacatttagttaacaggttgctggtttactgggaaatcataataaatcccaaaatgtatattatgtcaataataaaaccaatcaaactatgatgacagttcctcaaggtctatcaggtaatgtgtaaaagtggtactagagcagaggaggaaatgaacatttctttaggttggatgtaaggaagctttgaggatgagtgttagttgggtatttagggttgattgaacttagacaggtccatgaagaggtaaaggaacgacagacatgacatagtttgcagcatagtgtatttgagcacagagaagaaaacctccaaacaatggaactttctttttcctgactgccacacattcttttaactttgaggaaaaagggaaagaaaaaaaaaaaagagtctactgaaccaattgtttcagctgttcctatgtgatcatagcattgcttatatggattgtcaagcaaggaatgagctcataaaaggatattaatgtgtcctctttattgagcaaagtagaattacagaaaaggtgatttcaaaggcacatggctctttcattacagccttcaggggcaatgtttgatcactgaaaactggctgctttgttccagttttctctgatgtttggcattatcctgaatacatatgctctgacttggaaagtatcagtctgtaaagatttaatagattcgagacttgcatactgaaaatacatgtatcctggttaaaattgaataaaaactacttgaatatgtatgtctatatataagcaaacatatttcagacacacatctcagtaaaagtctaaaaagcaatcacacatacatgtttattctgagaatatgaaagttgcctattttaaaaattcatcattgtattaaaactcaggaaaacatatgttaggaggtgttatattggtaagagcaaaatatgggaaacttgcctgtttcagggaatctaagtagctacatgcccttgttacctgtcactgacacaatttcttaattttgatgacccctgagcacaggtgaggatgctgtgtggctggtagagagtttgtctcataagcccaaagcccttgggtggatctctaataccatgtaagctggatgtagtagcacaagatgtaatccaggcacctgggaagctagaagcagcaaaatcataagtctgtggaatacttgggctgcaacatgagttgaagagcagccttgactaaacaaaacattttctaaatagaaaaagagaaggagggaggggggaagaaagagagagagaggagaggagaggagaggagagagagagagagagagagagagagagagagagagagagagaaagagagaatagtgactttcctattttgatagaaacaaacaaaaaggtagtcacatgttaaagaaaaattttctgtgttagcatttgcatgatgtccttttcctaatattaataaaagaactgaatatccttttattattattaagtagagagatagatgcttaaagagagactagaagcttttcctgcagtgactaaaactcgtaattttgttgtcataaaattccctggcttcttgctcctacaaatggatatacaattttgcacaaatttatcttttgaattttgcatccctttgaacctttgaaagaagatggcattcccagtcagtcagttggctataaatcatattgaagaatagacactcattgtactgaaattaagttcaacactttcagctaaaaggtgttcaactatattatatcctatttcacatgataaagaaaaaattttccttaacacatgttgcaattccttttgctccccctctccaactcagtgacatgaggctttctgtgggagggtggcacattcctctctgactgcttttgcagcgatccccaaacagaggctatttcagttgtttacttgcagcccagaccaatgctttacaaaccttaatgtgcttattaatcatctggggatcttgttaaaaaggcaggctctgattcagcaagtctagccgagattctaacaagctcccgggtgatatggtggactagagtttgggtagttaatgtctagagtacaaatgacctcttattaaattggtgtttgttcccaggccctgataactggaaatggagattccccaactttaaagttactccacatcaatgttttgttcagtgtaaagttaattttaaaaaattgtataattttgactctcttcatttatcccttcttaaaaacaaaagcaaatcactccctctctaactttccaggttaggcctaataaactgctgaaagtttccagaagtttctttttgcatctttgtgccctcccaatgctgttccctttgtctatccttgtatcacgtgactcatcctttgaagctcacattggctgtagtctccttctgaattccttcaattccttctccttatctttttcctttggaaacaaatgcctctgagacttcataacaccctgcatttcatatactatgctttcttcctcttcttttgaaatggtctgtctacttgttcactctttgcaggaccaggcttctgtggatatatatatatatatatgtatatataattcctgatacatactaccaatcacaaggcctaacatacttggtttactgactgagtgaaaagggtgtactgtaatcatagaaaaatataatgtaatatatttttcccagtggaccttaaacttgagttgaaaataataagaactaaactcataaaaagttaaatacaagctgggcggtggtcaggaggcagaggcaggcggatttctgagttcgaggccagcctggtctacaaagtgagttccaggacagccagggctacacagagaaatcctgtattgaaaaaccaaaaccaaaccaaaccaaaccgaaacaaaaaacaaacaaacaaacaaaccccaaaataacaaaaacgaaaagaaaaagttaaatacaggatgatataatagtggtataaaatgttagtatgtgatttatcatagcaaatatgtgttctgaggtgactgacaaaatattgccatgtttttaaaaattatttatcttatacttcagtttattccataaagtacttggaacttgtaactccatgtagtaaggttaattaaggtatggaaacataagtagttaagagaaaggtatgagaaatcaaaagggggctgtggctcagatacaaaaagctcaagaaccagacaaacgaatcttcaggcctgatgttctcggcataggatggtactgtttacaggttggacttccgcttgggaggttcaagtccacctaggctcttagcagctctcctgtcctctagcttcttgttaatattaggataagaacatcatacaaatgctaacacacaaaaaattgctttttaatgtgtgactcccattttgtttgtaacgatgaaagtaactactcaccatagtctccctgtttttgtctctttctgtctctgtctctctctgtctgatggacaattgtttctttggttacctagtggtgaccgtacctctgtgtaaatgtccctatgcatatcaagtcccttcagatatctttgattgtgatacatgctgagacacaggcatgatcagaacattttgaaataggtgaaattccagctttagaaacatttacaaaaaccatgaatgctgtgaaagggttataatatcttagcagactaaacactaaagaagaaaggaaaatagagaatttatttttcaaaagagaacaattaaaaaagcagacgaagctagcattttgtccttataagcttacatttcgtatggtcaagaagctttgagccaccatggaggaagggacaaattgctatcctatttgattgcctgcagttgtgtaatgctctttacaccagttatgagttaccattcatttgtgacacaattatattgcagaaaatgtgccatgagatctgtttagactagagccgtctgtccagaactataggccactcatctgtttggagctcagatttgattgttcccctgcctgttctccttgtattgggagacacagaaagaaaataaatgaacaaaagccttaacattagcgtctgtgatgaaaggtttgtccaggaggctgaaatcctgaaccgaagtgattcttttgttttgctgggttggtctgccacctattgccataaaggtattgagtatcatctctagcctgtcaagaagcaacagataaaaatgatcaagaagacttaaaatcacattgatgacaagaagcaaatctgaaaaataaataggaagctgttagtatgaactcttggtatacacattgctctgtctttgggtcttggattccattatagccttgtttgcagtacatattcaaacaaggctataattgctgctgacttgtacgtgctaattctttgacctggtagaatgtaccaaatattctggcagggaaggggcgtatttcctggtgcgtggtacatttttgatagtcaggttaaatttctgtttaactaaggaagaaactgagtaagaacagtttatgtgaggcaatgcacatctgttttgctcttcactgttgaaccttttttttttaagtttattttctttcttctcagggtctgtttatgagatgtttggcaatgaatgctgtctgtcaacaggagaagtgattaaaatcaccggtctcaaaattaagaagatgatggctgaaatttgtgagggcgctattggaggttgtgagtctcagaagccttttgagctgcccatgaattttccaggtatttctattgcatctacttcacagaacacagaaataatgatagctttccttatgaatataatagtggtcatttctctctgttgttttaaaaatcaaaaatcccagctgtttgactttagcacatgaagatttaggagccaggagttgtggtgaaagcttccttgctcagagaggccaagaaagcacccgactgatcttcctactccaccagcatcctagaaggaaaaagctttcttctccttcatattgtcttaaatacctcccagcttaagatccctcctttctgtttcttaccctctgtccactggttgccagctctgactctttttttttttttttttttttttttggtttttcgagacacggtttctctgcatagccctggctgtcctggaactcactttgtagaccatgctggccttgaactcagaaatcctgcctcccaagtgctgggattaaaggcgtgcaccaccacacccggacagctctgactcttaacctagactttatttagctcttggattaaaggaatgtacaaaggctgagccacatcacaaggttttaccagttcacaatctgatcaaatgtgatcaaatatcctgcaatgttgtataccggcccgcggcctatatcaacggggtaaacctgggaggctggctggggctgaaaaagacttagactgggagagattaatggagaccaagacaggattctgttcaaggcccactgtttattaagagaccgtgcttttaagggggaaggcctatcccccaccccaccccccaccccaaccatgccaggcttcttgatgtattgttgccaagtagttagcactagtctgccagctccacacttggtgcctggagccattttgtcagcgctggtcgccaggctggccgctcattcaggaagttctcaggaaaacaggtttagcctctctgcaggtagcagaagagcagggcagttgtcacttcaaaaagaagctggacaagtcggaaagctgcaccgcacctcagtggcagcatggtctataccagccccacactgcaacatttctcttgttgttgttgttgttgttgttgttgttgttgttgttgttgctattgctgctgctgctcctgctgctattgtttctcaccacgtaatccagactgacattgaactcaagagtgtcctgcctgggctgctgaatgctaaaattacaagtttgcaatggtgctaacttcgaaaactaggctgtgtgttgtgtgggttgaagaagataaaattcctataggtcaatcaattccatatctacaaaggacaatctgttatgcattggacacaaatgttggtccattgtctgatcctatcatatagggaatctacacctgggtgagattacctctagcaacttcttagctactacctttgtagtagtctcagtcttcattggaaatgtttctgtccttctagggctaccttgtatagtctatactcagtctcagaggccaagtcaagttcaacacctggatcggatcattgttctgacctattaactggactttcccaggtttaaaatgtatctgggccctcattttagctgggagatccctccccagtagggggtaggggcactcagggatgactgagtgaatgggttaccatcccattctcaagtccactgttcttcgggtagtacatgaatattatttggtgcctgtgttcccttagacccaggacttcttaggagacaatggcccttcagcctttacaagcactgaagattaagctccggtgtccaccaggaattccagaggctttccctgcactctaaggattaccctggcttggggaaggaggtctgttccctgactccctcaatcttttgtttttccttggtgattatagtcttattctttggctttctctttgggcattctctagtccagtatccttcttacttacaacaggtggttgtagctgtaatggttcttagctaagattggtggacaaccttttctaggctttttcccctcagcaatattttgaagttggcacttcctctgtctctaatctggattactattggcaagaaggactttggctagatctctgtttattagcttctctgtcttaatcttcttttcatctttagtctccctactatggtataccttcttcacaacctccactaaatctctcaatgacttctctctcttagtctttctaacttctgaaacttccttctaatggtcggtgctgatttataaatgccagcgctactgtgttagaattctcagtctcctcaggatttaggtgtgtataatggcagaaagtgtccataatctgcttgagaaactctgttgggcctttatcatcctttagcctgacatcataaaccttagccaaatttgggtcgatgagtggctgtcctgagacccgccattagaggttggtgatagactcggaaatgctcccacccttcaccagtattatagccccaagcagtctcctgaggggaaatcttttgtctgtcaacggggttctggggtggagtgcccttaggacatggaacattctttggacctccaatatgatgtgtttcttttcctcagttgtaaagaggatctttaagagctgctgacaatcatttcaagtgggctgatgggtaaaaaggatattgtctaagagaccaatgagctctctagcatagtcagagagtctggcattctctctcctccaattataaaaatcagcaatagtgaagggccaataatggtggagttgattctcctgttggtcagctgattctgttgcccttaggcgtaagacagtggaatctgcccagctctatagcctaaggaggcattgagtgcctgcttccggttccctgtgcagccccccccccctgcccagcccattcttgaagttgatactattgaggctgttggcacctcctccgagggtagggggagcaagggcagggctggagctggtacagccaaagctggtgcctgtgggaagcttgcgcagctgaaacttgtgtgtaaggagatgggaagagaacatcttccgatgtagtggcctataaaatggggtgaagaggcacaggaggtttgcggacttcctgtttacattcttccaccaccagggccgacatgatgaagaagcgttagctggagggaagaggaaggacttaacccacagtggtcgattattaactaaatccttccaaacatacagggaacttgatctgggtgtccacgtgctttttggaacactctgtcatctactgccaacaccatagggatgtgaaaggtcccctctggcggccattcaactaggaaggctggacactctgagctggtatatgtgtgtatattttccctttcttcatatccactgagagattgtgaactctagttttcatttccttaaaatgagctaaaagaatgttgagggtgtgagaatcagtctgtcccatatcaaagtatagtacaacacgaaacaaaacatttcaagggacgcaacagacagacccacacgcacgaagtagccacttagtgactggaaacaaaaatatatccaaacactagaactcacagactctggcctcagaaactgaaagcgaggtagagaggaaagcagcccttcctcgtcacaaattccccccacccccactcgccccacaggtaccggacaagccctcaggaagtccagggatgtgtccctggtcccggcattggtggctctccagtgagtatgctctagccaccctctgctgcttttccaaacacctcgaggcttttccaatgccaaaagcaagaacagaacagacacaaccagtatagaaatactgacactcaccagccagcactagactctcccaattgcaggctctggagatctgctgaggaatctcagaagagtcccagaatgttatgcccagttcatgggaaccccagaagaccgccagaaattgcgatactgatgtactaaacaaagagagtttttattatacgagtgtgggtgctatcacagaccttccagctgcacaggttaggaaagcgatgctcaagttcaagggtttgagatatatatatatatatatgaaaatgcatatgctggggcgctcaaggcctggcattacatgattgagtagggggaaaggtgtgcggtccttcaaattgataacatttgtttagacagagaggcggaatttcgcagttggagaaggacctctttgacctggggaagaagtaactcatcccattataggaggccagcgtgttgttacaaagcagtcacagctgtttgggaacacttaattgtctctttcccatagctcaggagtgtgctttatcacatcaaggatactaactcttgcctccttcaaaggcaagagccatctacaccaggaaagtgctattggttagaattatcagaaaaagggagcgcaatatacagtgctaggcaggaggccacgttccagctcccctttgtctgccctcttcaaaggtcgcaagaaggttgcggaaaggaagtgctggccattctggctcaggaaggggcgatgcgaagagacaggggcaggttacctgggtctcctcattccgacagtgtgggtaccacagcatgcatatcattgggtggtcattatatttacctgtcttgtgctctagactatgagctgtcaaacttgctttaaacagccagatagtaaattttaaggctttgtggccagattgttgccataactactgtacagcaatcttttaacatgaaggtcactgcaggtaacaaacccatcaaccaatggccgtggttgtagctcaaaatactctttatttataaaaaggagtggctagcaggatttggctagtcaagttatttgttgatatgtgctctgcactactaatttccagtcttcatagttctatcaccatacacattgaggataaattaaaaaacctgtcaattggatgaataagagagtagcgaatgaaaaatcacaaacgcattacaatataatatgctttacagtatgattaacgtatgcctgggctatgtgagaagctgcataggatcagtaggtcatgttacagaacatgaattttgtagttctacaagcaatttcaccatgttttgattgaattaccttggcatgttattttttttccaccgtatgtaaagttaaatactggtattcctacttgtctcctggtgcctttgtggaggatattatcaaaacataattaaagtgcttgctatggcatctggactatagcaacattcataaaaatggtgataacttatattactgttattaagattcttattgatatcattggggaagtagaaaatgcttttcagagaatgttataattgacctgatgtttggagagtaaaaataaattggttatattaatgagaagattcttgcaagtgctctaattctctgtccctttgaaccgaaagcttacccattttttttatatccttcctggtctttcaaaatgatggctggttttcaagcttggctgcacagtgacctcatctagggagattagaaagtcgtgatgcaggaggtatcatgatttatttgggcaaagtctggtcatgaagattcttcaaagctcccaagctaggactaacatgaacctgaggctgggaaccatggctttatagacaacattcctaagtagcaaagttagatgtaattgctctcctcatatgtatatgtgcatgtgaatgcatatgtgaacgtgtgtatatataatacacatacatatacacacatgtacatatatacacatgtatatatatttatgaatgtgtgtgtgtgtgtgtgtgtgtgtgtgtgtgtgtgtatgcgcagggtttcactatgtagcccaatctggcttggaacttcctttgtagaacagtcctcaaacacacaaaagagtgcccgcctcttcttccaaaacgttgtgagtagaggcatgtgctctcaccccaggttaagtacttttatgcctttattatttcacttattgctttttacatgtatttggagttagttttgtgtttgttggagtagcgtgatctaatagataacaaggcggctaagagcaaaagcaaaatcatttatcactgtaattctcagtacagaataaacactcactaagtttaaatgttcagaattttcagatagaggaatcgtttcttattggattagtgaaaacacctgggtagtggctgaagtctaaggtcatcactatctggaacttcctttgggctggggttagcgtgatgtctttgtcattaattgggtaagagtttaaaggtgtttacaggtgagccttcttgtaagggtcagaattaaagcagaggtgatgaaggacgatgagagaatgctctcttccgaaaagactccaggatcctacataaatgtttcctcttcattatcactaggggaaaagaccagaatcaagtcctttatcacagatctcaacagtaacatatgccttttccacgttaaaacctttcatttaaattccaattatattttaaaattttaaagccccgtggcacttttaacacatgtttttattggtatatatttattatgcatagtgataggcttcattcccgtgactctgtcatgtactttggatacattcactctcctttcttttctaatctctcccgttttcccattcattcccatttcatgtcgactcttgctccttcattaaaatatgattgcacatatatgtacaccctatgtcattttacatatatgtgtgaaaacctaggatccacaagtaaatgagaaatggaaacaagtgatatcaccatcatctttagctgtgcctatttttttcggcaagtgttataatgcaatcctttatggttaaatagagcaccactgtgcacgcacagcacaagttctttatcagttcttctgtggatgactacttgggatgattccataacttgacttctgtggacagtgcagcaacaaacatacagatgacaacatctctacaggatgttcatttataggctctgggcttgtagctcgagttgatgtatttgggtcatatgctcgttctcctcttagcttattgaggaactttcatatttatttctatggggctgtaataattgatatttccatgccagaatttgctgtgatttatcttcttaatgataatcattctggtgggaataagattgaatcttaatgctgtatgactttgtaatttttggatgcccaaggattttgaacacattttctgaaaactgttagttacattggtccatttattgagtaagttgttcagatattttgagttcttcatgtagtctagattctaatcttctgtgtgactatcaaagattttcttctaaagttgtctgttcaccaagttgttctcgttgctgtttagaaacttataaattctgtcacatttcttaaagcttcaaaattcctttttttttttttttttgtgacagaaccaaactaggggaataaaagatatctataatgaaaaactttaaacactcaataaattcatgaaaaagacgctaaacagtgtagagatggctcaggggttaagaacactatctgctcttcccaaagtcctgtgttccccagcaaccacatggtgtctcacaatcatctataatgatatctggtgccctcttctggcctgcaggcatacgtgcagccagaactctattatatatatatatatctttttaaagacactaaacaacaggaagatacccccaaagtattttaaacatcttgttttatttgcttaactcttcaaatttcctcttatggttgatttctaattcaattcaattatcagaggacatactttctgaaattcaaatttaaaaatatactaatacttgtttttatactctgtatagaagaatatatattctaccattatagaagtccattaaagatacttgttcatttatagaattatttacaccacctaggtgatcttttctacttgatctttcacaacagcatatccattattaaaatcatgtatgtgtatgttaaataaaaataaataagagttatctagggaaagaaagaataaacaggaaaggttatgggtatgaaaagggaggtaagtgggatagggtcgggggtagaatatgctcatcaaagaatatatgacgtcaaagaatatatatctttttaaaaagaaatttcttcttcttcttcttcttcttcttcttcttcttcttcttcttcttcttcttcttcttcttcttcttcttcttctttttcttctcttcctcctcctcctcctccccctccttttctccttctcttccttcacctcctcctcattcttcctgtattatttggattcctaaaattgtgtatttttttgtttaatgtactttgagagtcgggggacatgtgtatctatatttataattgctagtggttttgagtggagagtttcttttaacttcaagataccttttatagtaataacattttaaaatgtaaatttggttccaatttatttttaaacattgtcttgatttgtagccaagcttggaactgttttcacaatattcttgctatagcctactgagagctgagattacaagtgtgcaccaacatgccttgctatattgtttctgatttaaaatagtttcttcattttttttgctttcttatttttaacaactaattgtacaggctatcatctacatttttactctctacctacttatgtctttaaatttaaagtctcttttgatacacatagtatatgctttgatatttttcttctatcatattaagggtggtttaatcattatctgcttttagttaatatcataactgatagtaaagaatttagtgctattgttttgccacttgtttttcatgttttttatttttcattgctctctacattttccataatgaatattttttagcattccactttagttcctttgcattttaatagatttttacatttacatagagaagttttgggtttataaaaaaaaaaacctaagtagaagtcgctttagtgagatttagtatgcaaaacaccgaaatcaaccaaccaaacataccagaaaaaaaaaaaaaaaaaaaaagaaagatgaattctccccactctgattattggactgaatagtaaaaatagtaacagtctgtttatttttaaaaagtaccagattgtcctgcaaaatatcattttgtactactatgaacaatgaatgaacatccctgttcgatgtcctctccaggaattttctctatcagtgtctgcatttggccattctatacattcaagtctatgatattaaagtcattttttaaatctgtaattcccaggtggaatatgaactttatttgatgagatacttgaagttttttgcccattaaaagctgtgctatggtttccttacattatgcactctgtatacttgtgatgcccagttttgatcacattttgctttggttaatagtttttcttaaatttgtggtttgccttttaattctcatctttatggaagttttttttttaaaaagtctaatttaccttttgtttcttttctagattgtgctttacaactgtatttaatgttcatcttcaaatccagtgccatttatgacttcttaagtagttacctggtatttgggggatttcctgctctgtattttgagttaatatttaaaaggttgtatgttctatattcacttctcgcatacagtggtcaagcaccttttgttgcaaaccactggatcaggtttcttttgttttctttagtggattatacttctatggaaacattattgcactgtacattgtatcacattgttcagtctttttttaaagatttatttatttattatatgtaagtacactgtagctgtcttcagacactccagaagagggcatcagatcttgttatggatggttgtgagccaccatgtggttgctgggatttgaactccggaccttcggaagagcagtcaggtgctcttacccactgagccatctcaccagccctgttcagtctttttatcctttcactatcagcaccttttctatactgttgtttactttgtaataagtcttgatgtcaggtaactcttctaaagttgtccttcttcttccaaatgttacgtattctgtggttctttgcctcttcatatcaactgtaagttatcattaatattcataagataacttcccagcattttgactggagttatgattaatttacagatctaggtgggaagacttgagtttttattacagtagtgaaactttctagccataaatgtagaatattactctattagtttagacagttttatttttctcagaattctatattcttcttcatagagaagtaatacacacacacacacacacacacacacacatatatatatatatatatttagaactattggatttagagatacctaatttattttttactacctattaatttatttattgggggaagtgtatatggggcaagatgttcatgtaagggtcagaggacaacttgtgagagtcagttctttttaatatggatcctgaggatcaaacacaggtcatccggtttggtgataggcttcctaaaccattttgccagctcatcattttgagtatactaatgacattttaaaatttttcaattactgcttgactattgcttacaaaaatatgtatttaaaaataatcatttgtttcttgctggaattgcccccttgccttcagggatggttttatccaacactaactaggatttgttgttgttgttgttgattccttaagatgttctacatgaacaaatgtgctatctgtgaacaaagaaacttttgtttgagcctactactattggtgaccagtgcgattttgaaaataagacgaaagaagttgtgtgtgcctttactaccatctaattagcaagctctccttgtgttctaacttgctgaggtttgtgcgatcattttttttgtactccatgaatataatatcaaatactttttctgcatctattagtgtgatcataagattttctttctttagcttgtatatatgatatatcatattaattaatttttaaatgtcagattattcttacattggtaaataagaaacacagtgatcatgcagtataatttctttctaccagcataagatttaatttgttattttgagggattcttatacttgaagtaatgacaatgcattgaaaattacattgctacatagtattcttttcttattacattggcattacaataatgttgggattaccttagattaaatcagaaagtatcacgctattttcatccttagggaatattaacagtgtatttcataatttgtttcttaaatgtttataagaactttttggtgaaccccatctgggcctggcattttgtggtcaggaagtcattaattattaacccaatatctttgataaatataggtctattgatagatcctgttccttttttgatgaggtgactatttcaagcaggttagaaagatggtgagaatatgttcattcatatggtgtgtttactaacacttgcagtgacacaggatttgcagagatctcagtctattttgatttgaggtatttctgtctactttttctctttgttttcattactacagccaaatattatcctattttcttgatctttttaaaggtgctaaaagagagcttttttgtgttacacattgatacatgtacacatacacatatgcaaacacatgcaaggacgtgtccatgcacatacacatacatacacatgtccattcatgtactcacatgcacatatactcatacatgcatgcatacatgcacacacacatgcaaaagaatgaacagacatgctcatggacacacacttatatacatgcatccactcatgcactcagaggcacattgatacacacacacacacacacatatggaataaattctagcactttctttgtgaggcagttctctaatgacagcagagttccttgatttttatcagggagagtgctttaatttctttcatatttgaaggacaattttcctatttgtggactgaggtcaatgggctgctttccttaaatactttatgaaattcacttcactgtctagtttcctagttctagtaaattcaatgcctattttgtcctaccatagatgtttcgtcccccagaattctttggtaaattttctgtagtatgctgagatgcagtttttgccttttgtcctgctcagtgtcctctggcttccccgaatctctttactgaatctgcttttatgtttagcattaatttggaagacgttccttattatttcttcatgtttctctgcaatatcttctcttgacattgctataatgaatattttgtatcttctgatttttatggtccttggatattctgggatttttaaagatgtattactatatttcctgattgtttttctagaagatttttctagagatcgcccccccaccaccaccttgctctaagagtgattcagatatgtgagcctgaccatagagcttattttgtttcatcaaaatgtgtacttttgttagagcctgtatgcattataattttcttcttgctcatcagccatgagtgacagctgctgaagcatatatagtgtgacaggcactatatatagtgtgacaggcactatatatgcctataatgaagagatgacaagctgtaggataaggatatatcttctgtagttctcattctcaagttgagcctctgcctctgaactatgactttcatgaaaatctgccctgcccttaggtgggacaggatggggacagtgggctgcttttgtgcagatggttatcttcctcctctaaagtagaaggctagaagagccggtgttctagctggcattatcatccatgccttgggctaggtaagctttgataaaattccaatcatttatgtgttggtaaattagtttttcttgtgggcattttggatttccttggagaggaatttcatctccttgtctcttgggttgtcccactccagcttcatctctcacacagaattcaattggtatttatatctgcagatacacagccatcattttccgcctaggcttctttcctaaatcacagatgtgaacttaatgtcagactagacttttcagctcacatgtcatagacatttaaagaatccagacttagaaataatatacactcttacactattttttagtgtttgtcctgcagattacaaggaacatttttatttttaacaatatagtttggactaattaatttgagtgtctttcagagattcacttaaaaaaaaagtctaactttgaaggtttttgtgagtttttcttgatctgtgatttttctatgcctctgtttatactctcataatttccattttcctgtgcacatttgtgtctgatagatcttggggctatgttcactttctgtcttcttcatactctgggcagtcacagttaactccaaatatgactaattatcttcttttgtaagatagcattctcatgcctttatctctataaaccaaatttccttgaatctaacgtaacttgcacaaattatttctctgtgaagtttgttgtctaggctttgtcaggcaccatctctcatggattcttcatcttctggcccctctccttcccactccctttctcctcgttcccctcccccattcccatgtatgctccatgctctctgtcactctctctctctgtctctctctctgtctctctctgtctctctctctctgtctctctgtctctctctctctagtctgattcattctttttcttaaaaactgaatatattttaatatatttttgtttatttcttgtgtgtgaacatgcgtggctcacatacatgctacagtgatcatgtagagtttagaggataacttttggtgcttggttatcttcctctactgcatggatccagaaatctatcttaagttaccaggatcagcaacaggaacctttatcgctgttaatctcacgtggccctgaaatctgaatgtttctaagagctgaatgtagacacactaaaaaacctgcccttcctctccttgaggcttcttactgctagctggttaccagttttccttaccaaagtccactctctttgttatgtgtggctactaaatattttttctttttttttttagaaaaaaaaaagttgttttttcagacaactcttaatcttttttttcttcagttgaaatctataagtcttaagcttttgttaagcgatttctctctttatttgggttatgtcattgaatctattagaatccattaaatgcattagaaactgtggccaaggaagcctagacattgaactttattgttagctattttaacatggaatcctgtacacgggcataattgttcatgatgagtatgtggccttctaaaccctctgcagtttgttgaggcatctcagtgtccttaggacatcttgtggaccctggttattttaaacatctcatgccatacccttggtcttcgctgttattgcaggtagctgaggacagcaagtactacctactgtgtctttgacaaatgtttttagtagaagggttttaaaatttttattttatttctttgccatggaatgtacaaaaaattagtaaaataaagatgactttctagtgtggcttagcgaggtactagacagtaaataattgcagttttctggaattgtgtttgaagagccttcagccatcttcttccacagtatgatgcttttaggctgctggttttcaaaactaccatgaaactttggatggagacaatggagggtggggacttgattattctgcttgtgagattcagtcacataaatgaatttttcaatttctccaacttcttgtttaatttctaagccctccttagaaattgctaagaagcagtttgctgttcttatgcaggaagtaacttctagcaactcctgctttatcattttagatgatttccatcaccctgtattgaagtatttaaatacagatactcattgctggtggtgagacctggagagatgatcccacaaagtttcatttgcaagtaaataaaacccactgacaaaagatacagaactttgcaacaaacgcatgcttctaaaaactccggcttgaacaaacaagcatcaaggcaggaaaggtttgtggggatttgagagaaatgttttagggaacaggtacaaatcttctttgctaaaaggtagacaggagaacgaattttcaacacacacccatttatatactataatataatgcttccatatgtttctattttgtcacctcccaaatgctcaaatacattaaaagataaaaagtgaatattacatttctctgtgggaataaaccaactgcccaagaagaacagtttgttcttttcaaagacagctctcttggctgagctggaaaacttagcagttgctgccaaacacaacaaaaatatatcctgatgcttggtcgctgattgcattatctgcatagattggtaaatcacatcatacttggtttacaaacaggatccaaattcctagattactttcttgaaagatttattcctcctttgtggtatgaggaagtgtgaataacaatcatctcctggttagccatgagaaataccctgtaagaaattgtttccctacatctttatgatgagcaatgatgtttttcccaaacggcaattgtacactgtatctctgatactctggtttcccttgaaaccttataaatcttttaccttttccattgtgtctctcaaccataggctcataggatatctgaatcgacccataaaactgctgctagaattgcaagactagattgaagaaatgtttctccttgtatttttatatcctagtctatgaattgtgttactgtgcagaaatcctatttcaggaggcagggagcctggagaagatgtaaaagcaaagctcaggggtgggttagcccctgttactacacaccctgagctctcctagcacattgcatgaaggtaatgcgatgatgcatcaggcaccattttgaatacatgtgtgtatgtataagttatatccattcacatttgccacttgtgttaatgagaggcagagtaaagtccaaagtcatgtagttagtaagtggcttttatttaaatgtgtgctagctctggctagtagaaatgaattacataacaaattaaacatttctaataggtccattaaagtattatgtagtactgcatttaaaaatcacctccagctggggagtggtggtgcacgcatttaatcccagcacttgggaggcagaggcaggtggatttctgagttcgaggccagcctggtctacagagtgaattccaggatggccagagctacacagagaaaccctgtctcaaaaaacaaacaaacaaactcacctccaaattcagcaacttcagacgaaaaacatcttacatgctttcttgagcatatgaaaaagttttaaaaattattagccaactatttattaaaactagctcaataaagtgcttctaaataaaattggttttgataaaatgataaaaatgatcaaataaatatgtgatttttgcctgggttttgaaatgcctaattcattaacatttgtttaagtgaatttatttggagactggtatatttaattcatggaataactgtaatcttacattcagtgggtctgtgttatgggatattcaccagaaaagactgctcatacatgggtttaagccaatagaaagtcttttcttagccagataggaactacagatcatgctaatatagccatgaggctttctcaaggtgagcttttaagcacacacacaaaaaaccccccaacatattcttggttgacacttcaagaagcaagaatagttagccgggagcagaactaaagaaaaaagcaaagttactaaagagcatgttaagtatgttttgaaatgctcccagaattatacggactctgatggagtgggctttattttaggtttggcaggtggtgctgcaaacttactgagttttacagactgaacgggaattcatcacaaagtcagttgtcctaaggtctggggggtctactaaggtttggggtcctataacaggatgctggctaaatgtttttgttttattttgttaatttgacacacattcaatcccctgagaggaggtgagaaaatacctctatagcattaactgataagcaaagtgtgggtgctttcttgattaatgattaatgtgggagggccctgctaactgggagggaagtgctacctgtgggcaggtgggtctgtacaatataaaaagcaggcttaggaagccatgcaaagcaagccagtgctcctacaggacctctgctttggttcctgccttgagttcctgccttgagttcctgctctgacttccctgactgatggactgggacctgagagttgtaggctgaaataaacccttcctttcctaagttgcttttggtcatggtgcttctcacagaagcagtcagcctatgataagcagagattgcttatgtttcaccctcccactgaagtgtgtatctcttccacagcttataatcatgggcacttcttcatttgtctgaagtatgagttcttaaaaatctgataaacattatgcaaaagtgtatttaaaatatacttttctggtaagtagtatcttgatctgtttttgaagaaagcttgttaaaagaagcaagatgtttctgcctggctgggaggacaaaggggagttcagagtggctctgtacagaactctgtctcacagaacttgcttccaaagcaggaactagttttccacattttctgggtcagattctcataagctgtgccattcccactgtgctcacttatgcaaactaaactcagctgtgactattagacaaaatattttcctgacaaaaaagggatccctgtacaaactatgggagaaaatacaaattagcacgcagaagaaagccagtcttttgtggtaatatactgttttaattttggggtcacctgtcttgcacatttaagacatagattctaagtttctagcaatcacatatatcacctgaaagacaaatagattttaaaattctaggttaaaacagtattttgctttccacctatatgttcattgtttttagcattagaccagtgttttatcaaaaaaaaaaaaaaaaaaaactgtttgaaaatgggcaactctccagctgctgctgttctctattcgtgcctctttctaagctctattttattacttcatgttcatcttttcctgtacgtgtacttctcccagtgatacggtttttagagcaacatcatggaaaggccatcatgagagcatctacgttgtccttgaaaactatgaacactggtgttcgggtctttcactcttaacagaacagtaagatcgtatgttacttatactcaacgttgtttcaaggatttagaggctgtttataacatccttcataataatatctagctataaaattagtacaaatcctgccttctatcttgctgctgctgcttctttctttcttcttcttcttcttcttcttcttcttcttcttcttcttcttcttcttcttcttcttcttcatcttgtttttgagacagtgtttctctgtgtagccttgctgtcctgacactcactctgcagaccaggctggcctcaatcttgcttcttttaataagaatcattggaatacaagctggttttcatatcctccttgactccacaaaccaatatgcatagtgccagccatgatcaacagtctcaccagagtgatacaagtgttgcagtcaaagaacctacactctctggtcattatcaaagttcatagctcctatttaattactcttggtgtcatatagtctatgggttttgaaacatgtataataacacatactcgccattatggtgtcataagaaagagtttcgctgccttgagagtcctctgccacattttgtagcctctctgctgccatacctttaccgactctgtagtcttgtcttttctaaacatcacatgactggaattatgtggtaatatagccttttcagattttcttctcttattccctcaataaggtttcccatagtttttcatggacattgataaatgtgtttttatgccctgaagtttattttttttccatttttattaggtatttagctcatttacatttccaatgctataccaaaagtcccccatacccacccaccccccactcccctacccacccactccccctttttggccctggcgttcccctgtactggggcatataaagtttgcgtgtcaaatgggcctctctttccagtgatggccagctaggccatcttttgatacatatgcagctagagtcaagagctccggggtactggttagttcataatgttgttccacctatagggttgcagatccctttagctccttgggtactttctctagctcctccattgggagccctgtgatccatccattagctgactgtgggcatccacttctgtgtttgctaggccccggcatagtctcacaagagacagctacatctgggtcctttcgataaaatcttgctagtgtnnnnnnnnnnnnnnnnnnnnatttgtagccaagcttggaactgttttcccaatattcttgctatagcctactgagagctgagattacaagtgtgcaccaacatgccttgctatattgtttctgatttaaaatagtttcttcatttttttttttgctttcttatttttaacaactaattgtacaggccatcatctacatttttactctctacctacttatgtctttaaatttaaagtctcttttgatacacatagtatatgctttgatatttttcttctatcatattaagtgtggtttaatcattatctgctattatctgcttttagttaatatcataactgatagtaaagaatttagtgctattgttttgccacttgtttttcatgttttttttatttttcattgctctctacattttccataatgaatattttttagcattccactttagttcctttgcattttaatagatttttacatttacatagagaagttttgggtttataaaaaaaaaaaaaaactaagtagaagtcgctttagtttatccaaaacaccaaaatcaaccaaccaaacataccaaaaaaaaaaaaaaagatgaattctccccactctgattattggactgcatagtaaaaatagtaacagtctgtttatttttaaaaagtaccagattgtcctgcaaaatatcattttgtactactatgaacaatgaatgaacatccctgttcgatgtcctctccaggaattttctctatcagtgtctgcatttggccattctacacattcaagtctatgatattaaagtcattttttaaatctgtaattcccaggtggaatatgaactttctttgatgagatagttgaagttttttgcccattaaaagctgtgctatgggtgctggtgagatggctcagtgggtaagagcacctgactgctcttccgaaggtccagagttcaaatcccagcaaccacatggtggctcacaaccatctgtaatgagatctgactccctcttctggaatgtctgaagacagctacagtgtacttacatataacaaataaataaatcttaaaaaaaaaaannnnnnnnnnnnnnnnnnnnnnnnnnnnnnnnnnnnnnnnnnnnnnnnnnnnnnnnnnnnnnnnnnnnnnnnnnnnnnnnnnnnnnnnnnnnnnnnnnnnnnnnnnnnnnnnnnnnnnnnnnnnnnnnnnnnnnnnnnnnnnnnnnnnnnnnnnnnnnnnnnnnnnnnnnnnnnnnnnnnnnnnnnnnnnnnnnnnnnnnnnnnnnnnnnnnnnnnnnnnnnnnnnnnnnnnnnnnnnnnnnnnnnnnnnnnnnnnnnnnnnnnnnnnnnnnnnnnnnnnnnnnnnnnnnnnnnnnnnnnnnnnnnnnnnnnnnnnnnnnnnnnnnnnnnnnnnnnnnnnnnnnnnnnnnnnnnnnnnnnnnnnnnnnnnnnnnnnnnnnnnnnnnnnnnnnnnnnnnnnnnnnnnnnnnnnnnnnnnnnnnnnnnnnnnnnnnnnnnnnnnnnnnnnnnnnnnnnnnnnnnnnnnnnnnnnnnnnnnnnnnnnnnnnntcactatcagcacctttttctatactgttgtttactttgtaataagtcttgatgtcaggtaactcttttaaagttgtccttcttccaaatgttacctattctgtggttctttgcctcttcatatcaactgtaagttatcattaatattcataagataacttcccagcattttgactggagttatgattaatttacagatctaggtgggaagacttgagtttttattacagtagtgaaactttctagccataaatgtagaatattactctattagtttagacagttttatttttctcagaattctatattcttcttcatagagaagtaatatatatatatatatatgtatatatatatattgatatagttagaactattggatttagagatacctaatttatttttcactacctattaatttatttattgggggaagtgtatatggggcaagatgttcatgtaagggtcagaggacaacttgtgagagtcagttctattttatatggatcctgaggatcaaacacaggtcatccggtttggtgataggcttcctaaaccattttgccagctcatcattttgagtatactaatgacattttaaaatttttccattactgcttgactattgcttacaaaaatatgtatttaaaaataaccatttgtttcttgctggaattgcccccttgccttcagggatggttttatccaacactaactaggatttgttgttgttgttgttgttgttgttgttgttgttgttgttgttgattccttaagatgctctacatgaacaaatgtgctatctgtgaacaaagaaacttttgtttgagcctactactattggtgaccagtgcgattttgaaaataagacgaaagaagttgtgtgtgcctttactaccatctaattagcaagctctccactgtgttggcaagtctccttgtgttctaacttgctgaggtttgtgcgatcatttttttttgtactccatgaatataatgtcaaatgctttttctgcatctattagtgtgatcataagattttctttctttagcttgtatatatggtatatcatattaattaatttttaaatgtcagatcattcttacattggtaaataagaaacacagtaatcatgcagtataatttctttctaccagcataagatttaatttgttattttgagggattcttattcttgaagtaatgacaatgcattgaaaattacattgctacatagtattcttttcttattacattggcattacaataatgttgggattactttagattaaatcagaaagtatcacgctattttcatnnnnnnnnnnnnnnnnnnnnnnnnnnnnnnnnnnnnnnnnnnnnnnnnnnnnnnnnnnnnnnnnnnnnnnnnnnnnnnnnnnnnnnnnnnnnnnnnnnnnnnnnnnnnnnnnnnnnnnnnnnnnnnnnnnnnnnnnnnnnnnnnnnnnnnnnnnnnnnnnnnnnnnnnnnnnnnnnnnnnnnnnnnnnnnnnnnnnnnnnnnnnnnnnnnnnnnnnnnnnnnnnnnnnnnnnnnnnnnnnnnnnnnnnnnnnnnnnnnnnnnnnnnnnnnnnnnnnnnnnnnnnnnnnnnnnnnnnnnnnnnnnnnnnnnnnnnnnnnnnnnnnnnnnnnnnnnnnnnnnnnnnnnnnnnnnnnnnnnnnnnnnnnnnnnnnnnnnnnnnnnnnnnnnnnnnnnnnnnnnnnnnnnnnnnnnnnnnnnnnnnnnnnnnnnnnnnnnnnnnnnnnnnnnnnnnnnnnnnnnnnnnnnnnnnnnnnnnnnnnnnnnnnnnnnnnnnnnnnnnnnnnnnnnnnnnnnnnnnnnnnnnnnnnnnnnnnnnnnnnnnnnnnnnnnnnnnnnnnnnnnnnnnnnnnnnnnnnnnnnnnnnnnnnnnnnnnnnnnnnnnnnnnnnnnnnnnnnnnnnnnnnnnnnnnnnnnnnnnnnnnnnnnnnnnnnnnnnnnnnnnnnnnnnnnnnnnnnnnnnnnnnnnnnnnnnnnnnnnnnnnnnnnnnnnnnnnnnnnnnnnnnnnnnnnnnnnnnnnnnnnnnnnnnnnnnnnnnnnnnnnnnnnnnnnnnnnnnnnnnnnnnnnnnnnnnnnnnnnnnnnnnnnnnnnnnnnnnnnnnnnnnnnnnnnnnnnnnnnnnnnnnnnnnnnnnnnnnnnnnnnnnnnnnnnnnnnnnnnnnnnnnnnnnnnnnnnnnnnnnnnnnnnnnnnnnnnnnnnnnnnnnnnnnnnnnnnnnnnnnnnnnnnnnnnnnnnnnnnnnnnnnnnnnnnnnnnnnnnnnnnnnnnnnnnnnnnnnnnnnnnnnnnnnnnnnnnnnnnnnnnnnnnnnnnnnnnnnnnnnnnnnnnnnnnnnnnnnnnnnnnnnnnnnnnnnnnnnnnnnnnnnnnnnnnnnnnnnnnnnnnnnnnnnnnnnnnnnnnnnnnnnnnnnnnnnnnnnnnnnnnnnnnnnnnnnnnnnnnnnnnnnnnnnnnnnnnnnnnnnnnnnnnnnnnnnnnnnnnnnnnnnnnnnnnnnnnnnnnnnnnnnnnnnnnnnnnnnnnnnnnnnnnnnnnnnnnnnnnnnnnnnnnnnnnnnnnnnnnnnnnnnnnnnnnnnnnnnnnnnnnnnnnnnnnnnnnnnnnnnnnnnnnnnnnnnnnnnnnnnnnnnnnnnnnnnnnnnnnnnnnnnnnnnnnnnnnnnnnnnnnnnnnnnnnnnnnnnnnnnnnnnnnnnnnnnnnnnnnnnnnnnnnnnnnnnnnnnnnnnnnnnnnnnnnnnnnnnnnnnnnnnnnnnnnnnnnnnnnnnnnnnnnnnnnnnnnnnnnnnnnnnnnnnnnnnnnnnnnnnnnnnnnnnnnnnnnnnnnnnnnnnnnnnnnnnnnnnnnnnnnnnnnnnnnnnnnnnnnnnnnnnnnnnnnnnnnnnnnnnnnnnnnnnnnnnnnnnnnnnnnnnnnnnnnnnnnnnnnnnnnnnnnnnnnnnnnnnnnnnnnnnnnnnnnnnnnnnnnnnnnnnnnnnnnnnnnnnnnnnnnnnnnnnnnnnnnnnnnnnnnnnnnnnnnnnnnnnnnnnnnnnnnnnnnnnnnnnnnnnnnnnnnnnnnnnnnnnnnnnnnnnnnnnnnnnnnnnnnnnnnnnnnnnnnnnnnnnnnnnnnnnnnnnnnnnnnnnnnnnnnnnnnnnnnnnnnnnnnnnnnnnnnnnnnnnnnnnnnnnnnnnnnnnnnnnnnnnnnnnnnnnnnnnnnnnnnnnnnnnnnnnnnnnnnnnnnnnnnnnnnnnnnnnnnnnnnnnnnnnnnnnnnnnnnnnnnnnnnnnnnnnnnnnnnnnnnnnnnnnnnnnnnnnnnnnnnnnnnnnnnnnnnnnnnnnnnnnnnnnnnnnnnnnnnnnnnnnnnnnnnnnnnnnnnnnnnnnnnnnnnnnnnnnnnnnnnnnnnnnnnnnnnnnnnnnnnnnnnnnnnnnnnnnnnnnnnnnnnnnnnnnnnnnnnnnnnnnnnnnnnnnnnnnnnnnnnnnnnnnnnnnnnnnnnnnnnnnnnnnnnnnnnnnnnnnnnnnnnnnnnnnnnnnnnnnnnnnnnnnnnnnnnnnnnnnnnnnnnnnnnnnnnnnnnnnnnnnnnnnnnnnnnnnnnnnnnnnnnnnnnnnnnnnnnnnnnnnnnnnnnnnnnnnnnnnnnnnnnnnnnnnnnnnnnnnnnnnnnnnnnnnnnnnnnnnnnnnnnnnnnnnnnnnnnnnnnnnnnnnnnnnnnnnnnnnnnnnnnnnnnnnnnnnnnnnnnnnnnnnnnnnnnnnnnnnnnnnnnnnnnnnnnnnnnnnnnnnnnnnnnnnnnnnnnnnnnnnnnnnnnnnnnnnnnnnnnnnnnnnnnnnnnnnnnnnnnnnnnnnnnnnnnnnnnnnnnnnnnnnnnnnnnnnnnnnnnnnnnnnnnnnnnnnnnnnnnnnnnnnnnnnnnnnnnnnnnnnnnnnnnnnnnnnnnnnnnnnnnnnnnnnnnnnnnnnnnnnnnnnnnnnnnnnnnnnnnnnnnnnnnnnnnnnnnnnnnnnnnnnnnnnnnnnnnnnnnnnnnnnnnnnnnnnnnnnnnnnnnnnnnnnnnnnnnnnnnnnnnnnnnnnnnnnnnnnnnnnnnnnnnnnnnnnnnnnnnnnnnnnnnnnnnnnnnnnnnnnnnnnnnnnnnnnnnnnnnnnnnnnnnnnnnnnnnnnnnnnnnnnnnnnnnnnnnnnnnnnnnnnnnnnnnnnnnnnnnnnnnnnnnnnnnnnnnnnnnnnnnnnnnnnnnnnnnnnnnnnnnnnnnnnnnnnnnnnnnnnnnnnnnnnnnnnnnnnnnnnnnnnnnnnnnnnnnnnnnnnnnnnnnnnnnnnnnnnnnnnnnnnnnnnnnnnnnnnnnnnnnnnnnnnnnnnnnnnnnnnnnnnnnnnnnnnnnnnnnnnnnnnnnnnnnnnnnnnnnnnnnnnnnnnnnnnnnnnnnnnnnnnnnnnnnnnnnnnnnnnnnnnnnnnnnnnnnnnnnnnnnnnnnnnnnnnnnnnnnnnnnnnnnnnnnnnnnnnnnnnnnnnnnnnnnnnnnnnnnnnnnnnnnnnnnnnnnnnnnnnnnnnnnnnnnnnnnnnnnnnnnnnnnnnnnnnnnnnnnnnnnnnnnnnnnnnnnnnnnnnnnnnnnnnnnnnnnnnnnnnnnnnnnnnnnnnnnnnnnnnnnnnnnnnnnnnnnnnnnnnnnnnnnnnnnnnnnnnnnnnnnnnnnnnnnnnnnnnnnnnnnnnnnnnnnnnnnnnnnnnnnnnnnnnnnnnnnnnnnnnnnnnnnnnnnnnnnnnnnnnnnnnnnnnnnnnnnnnnnnnnnnnnnnnnnnnnnnnnnnnnnnnnnnnnnnnnnnnnnnnnnnnnnnnnnnnnnnnnnnnnnnnnnnnnnnnnnnnnnnnnnnnnnnnnnnnnnnnnnnnnnnnnnnnnnnnnnnnnnnnnnnnnnnnnnnnnnnnnnnnnnnnnnnnnnnnnnnnnnnnnnnnnnnnnnnnnnnnnnnnnnnnnnnnnnnnnnnnnnnnnnnnnnnnnnnnnnnnnnnnnnnnnnnnnnnnnnnnnnnnnnnnnnnnnnnnnnnnnnnnnnnnnnnnnnnnnnnnnnnnnnnnnnnnnnnnnnnnnnnnnnnnnnnnnnnnnnnnnnnnnnnnnnnnnnnnnnnnnnnnnnnnnnnnnnnnnnnnnnnnnnnnnnnnnnnnnnnnnnnnnnnnnnnnnnnnnnnnnnnnnnnnnnnnnnnnnnnnnnnnnnnnnnnnnnnnnnnnnnnnnnnnnnnnnnnnnnnnnnnnnnnnnnnnnnnnnnnnnnnnnnnnnnnnnnnnnnnnnnnnnnnnnnnnnnnnnnnnnnnnnnnnnnnnnnnnnnnnnnnnnnnnnnnnnnnnnnnnnnnnnnnnnnnnnnnnnnnnnnnnnnnnnnnnnnnnnnnnnnnnnnnnnnnnnnnnnnnnnnnnnnnnnnnnnnnnnnnnnnnnnnnnnnnnnnnnnnnnnnnnnnnnnnnnnnnnnnnnnnnnnnnnnnnnnnnnnnnnnnnnnnnnnnnnnnnnnnnnnnnnnnnnnnnnnnnnnnnnnnnnnnnnnnnnnnnnnnnnnnnnnnnnnnnnnnnnnnnnnnnnnnnnnnnnnnnnnnnnnnnnnnnnnnnnnnnnnnnnnnnnnnnnnnnnnnnnnnnnnnnnnnnnnnnnnnnnnnnnnnnnnnnnnnnnnnnnnnnnnnnnnnnnnnnnnnnnnnnnnnnnnnnnnnnnnnnnnnnnnnnnnnnnnnnnnnnnnnnnnnnnnnnnnnnnnnnnnnnnnnnnnnnnnnnnnnnnnnnnnnnnnnnnnnnnnnnnnnnnnnnnnnnnnnnnnnnnnnnnnnnnnnnnnnnnnnnnnnnnnnnnnnnnnnnnnnnnnnnnnnnnnnnnnnnnnnnnnnnnnnnnnnnnnnnnnnnnnnnnnnnnnnnnnnnnnnnnnnnnnnnnnnnnnnnnnnnnnnnnnnnnnnnnnnnnnnnnnnnnnnnnnnnnnnnnnnnnnnnnnnnnnnnnnnnnnnnnnnnnnnnnnnnnnnnnnnnnnnnnnnnnnnnnnnnnnnnnnnnnnnnnnnnnnnnnnnnnnnnnnnnnnnnnnnnnnnnnnnnnnnnnnnnnnnnnnnnnnnnnnnnnnnnnnnnnnnnnnnnnnnnnnnnnnnnnnnnnnnnnnnnnnnnnnnnnnnnnnnnnnnnnnnnnnnnnnnnnnnnnnnnnnnnnnnnnnnnnnnnnnnnnnnnnnnnnnnnnnnnnnnnnnnnnnnnnnnnnnnnnnnnnnnnnnnnnnnnnnnnnnnnnnnnnnnnnnnnnnnnnnnnnnnnnnnnnnnnnnnnnnnnnnnnnnnnnnnnnnnnnnnnnnnnnnnnnnnnnnnnnnnnnnnnnnnnnnnnnnnnnnnnnnnnnnnnnnnnnnnnnnnnnnnnnnnnnnnnnnnnnnnnnnnnnnnnnnnnnnnnnnnnnnnnnnnnnnnnnnnnnnnnnnnnnnnnnnnnnnnnnnnnnnnnnnnnnnnnnnnnnnnnnnnnnnnnnnnnnnnnnnnnnnnnnnnnnnnnnnnnnnnnnnnnnnnnnnnnnnnnnnnnnnnnnnnnnnnnnnnnnnnnnnnnnnnnnnnnnnnnnnnnnnnnnnnnnnnnnnnnnnnnnnnnnnnnnnnnnnnnnnnnnnnnnnnnnnnnnnnnnnnnnnnnnnnnnnnnnnnnnnnnnnnnnnnnnnnnnnnnnnnnnnnnnnnnnnnnnnnnnnnnnnnnnnnnnnnnnnnnnnnnnnnnnnnnnnnnnnnnnnnnnnnnnnnnnnnnnnnnnnnnnnnnnnnnnnnnnnnnnnnnnnnnnnnnnnnnnnnnnnnnnnnnnnnnnnnnnnnnnnnnnnnnnnnnnnnnnnnnnnnnnnnnnnnnnnnnnnnnnnnnnnnnnnnnnnnnnnnnnnnnnnnnnnnnnnnnnnnnnnnnnnnnnnnnnnnnnnnnnnnnnnnnnnnnnnnnnnnnnnnnnnnnnnnnnnnnnnnnnnnnnnnnnnnnnnnnnnnnnnnnnnnnnnnnnnnnnnnnnnnnnnnnnnnnnnnnnnnnnnnnnnnnnnnnnnnnnnnnnnnnnnnnnnnnnnnnnnnnnnnnnnnnnnnnnnnnnnnnnnnnnnnnnnnnnnnnnnnnnnnnnnnnnnnnnnnnnnnnnnnnnnnnnnnnnnnnnnnnnnnnnnnnnnnnnnnnnnnnnnnnnnnnnnnnnnnnnnnnnnnnnnnnnnnnnnnnnnnnnnnnnnnnnnnnnnnnnnnnnnnnnnnnnnnnnnnnnnnnnnnnnnnnnnnnnnnnnnnnnnnnnnnnnnnnnnnnnnnnnnnnnnnnnnnnnnnnnnnnnnnnnnnnnnnnnnnnnnnnnnnnnnnnnnnnnnnnnnnnnnnnnnnnnnnnnnnnnnnnnnnnnnnnnnnnnnnnnnnnnnnnnnnnnnnnnnnnnnnnnnnnnnnnnnnnnnnnnnnnnnnnnnnnnnnnnnnnnnnnnnnnnnnnnnnnnnnnnnnnnnnnnnnnnnnnnnnnnnnnnnnnnnnnnnnnnnnnnnnnnnnnnnnnnnnnnnnnnnnnnnnnnnnnnnnnnnnnnnnnnnnnnnnnnnnnnnnnnnnnnnnnnnnnnnnnnnnnnnnnnnnnnnnnnnnnnnnnnnnnnnnnnnnnnnnnnnnnnnnnnnnnnnnnnnnnnnnnnnnnnnnnnnnnnnnnnnnnnnnnnnnnnnnnnnnnnnnnnnnnnnnnnnnnnnnnnnnnnnnnnnnnnnnnnnnnnnnnnnnnnnnnnnnnnnnnnnnnnnnnnnnnnnnnnnnnnnnnnnnnnnnnnnnnnnnnnnnnnnnnnnnnnnnnnnnnnnnnnnnnnnnnnnnnnnnnnnnnnnnnnnnnnnnnnnnnnnnnnnnnnnnnnnnnnnnnnnnnnnnnnnnnnnnnnnnnnnnnnnnnnnnnnnnnnnnnnnnnnnnnnnnnnnnnnnnnnnnnnnnnnnnnnnnnnnnnnnnnnnnnnnnnnnnnnnnnnnnnnnnnnnnnnnnnnnnnnnnnnnnnnnnnnnnnnnnnnnnnnnnnnnnnnnnnnnnnnnnnnnnnnnnnnnnnnnnnnnnnnnnnnnnnnnnnnnnnnnnnnnnnnnnnnnnnnnnnnnnnnnnnnnnnnnnnnnnnnnnnnnnnnnnnnnnnnnnnnnnnnnnnnnnnnnnnnnnnnnnnnnnnnnnnnnnnnnnnnnnnnnnnnnnnnnnnnnnnnnnnnnnnnnnnnnnnnnnnnnnnnnnnnnnnnnnnnnnnnnnnnnnnnnnnnnnnnnnnnnnnnnnnnnnnnnnnnnnnnnnnnnnnnnnnnnnnnnnnnnnnnnnnnnnnnnnnnnnnnnnnnnnnnnnnnnnnnnnnnnnnnnnnnnnnnnnnnnnnnnnnnnnnnnnnnnnnnnnnnnnnnnnnnnnnnnnnnnnnnnnnnnnnnnnnnnnnnnnnnnnnnnnnnnnnnnnnnnnnnnnnnnnnnnnnnnnnnnnnnnnnnnnnnnnnnnnnnnnnnnnnnnnnnnnnnnnnnnnnnnnnnnnnnnnnnnnnnnnnnnnnnnnnnnnnnnnnnnnnnnnnnnnnnnnnnnnnnnnnnnnnnnnnnnnnnnnnnnnnnnnnnnnnnnnnnnnnnnnnnnnnnnnnnnnnnnnnnnnnnnnnnnnnnnnnnnnnnnnnnnnnnnnnnnnnnnnnnnnnnnnnnnnnnnnnnnnnnnnnnnnnnnnnnnnnnnnnnnnnnnnnnnnnnnnnnnnnnnnnnnnnnnnnnnnnnnnnnnnnnnnnnnnnnnnnnnnnnnnnnnnnnnnnnnnnnnnnnnnnnnnnnnnnnnnnnnnnnnnnnnnnnnnnnnnnnnnnnnnnnnnnnnnnnnnnnnnnnnnnnnnnnnnnnnnnnnnnnnnnnnnnnnnnnnnnnnnnnnnnnnnnnnnnnnnnnnnnnnnnnnnnnnnnnnnnnnnnnnnnnnnnnnnnnnnnnnnnnnnnnnnnnnnnnnnnnnnnnnnnnnnnnnnnnnnnnnnnnnnnnnnnnnnnnnnnnnnnnnnnnnnnnnnnnnnnnnnnnnnnnnnnnnnnnnnnnnnnnnnnnnnnnnnnnnnnnnnnnnnnnnnnnnnnnnnnnnnnnnnnnnnnnnnnnnnnnnnnnnnnnnnnnnnnnnnnnnnnnnnnnnnnnnnnnnnnnnnnnnnnnnnnnnnnnnnnnnnnnnnnnnnnnnnnnnnnnnnnnnnnnnnnnnnnnnnnnnnnnnnnnnnnnnnnnnnnnnnnnnnnnnnnnnnnnnnnnnnnnnnnnnnnnnnnnnnnnnnnnnnnnnnnnnnnnnnnnnnnnnnnnnnnnnnnnnnnnnnnnnnnnnnnnnnnnnnnnnnnnncccactccccctttttggccctggcgttcccctgtactggggcatataaagtttgcgtgtcaaatgggcctctctttccagtgatggccagctaggccatcttttgatacatatgcagctagagtcaagagctccggggtactggttagttcataatgttgttccacctatagggttgcagatccctttagctccttgggtactttctctagctcctccattgggagccctgtgatccatccattagctgactgtgggcatccacttctgtgtttgctaggccccggcatagtctcacaagagacagctacatctgggtcctttcgataaaatcttgctagtgtatgcaatggtgtcagcgtttggatgctgattatggggtggatccctggataaggcagtctctacatggtccatcctttcatctcagctccaaactttgtctctgtaactccttccaagggtgttttgttcccacttctaaggaggggcatagtgtccaccctgaagtttaaaatgtatcaatttctcctaattttatatgcaatatgaatatattgcagaaaattagaaaatgtgagaaaatgaaggaaaagtaataaacataccctttaattttggtgctagggctattttacatcatccatatgtgatatatcttttcatattattttctaggtacagtgaatatccacccacaggtagtcacacgaattaacacaacagactaaagttcatttctgtgtacttgcctgtgtcagtaaatatactgacacatactactattcaacatactattttatctttctttatttctcatgtgcataccccatagttattaaatctatcttgataatggtcagtgatataatttctattataattaatcttttaaataaatactttatttttacttctgattattaacaccttcattgtctagaaaatgttggatcaaaaataaaaatgtttttaaagatttttgtttgttttaagtcagggtcttattatgtacttcaagctagttttgaacctttggtcttctggcctcaacctttttaatactgaatttttctctctctttctgtgtgtgcacacacacgtgtgtgtgtgtgtgttttgtgatggtgaggatcaaacctagtttttggatcctagtttactaccctaccataaatcatatccccagaccttaatacattttttgctatatatttctagatcaagttttgttgtgtctctgccatttttacattactactaaggacttgtgagggaccaaccaagctgccttttttgaagacagaaattaaactgtctatcttcttcttgtatttgtgaattaatagcttcatcagaacaggacttaatataacaaattgtacctgtaatatagcaaattgagtgcaatttaatgattgttcgtattcttgtatcataaaataaagtttaaaaatactttaaaatagagcacgctaattaaacttacaatttaaccagaacctcagagagtagagatgtctgagacagagagcagagttaactgctatcagagtactgcaggcgggtgtggaacaccaggtgtacagcactgcaggcaggtggagaccaccaggtgttcagcactgcagcaggtatggaccaccaggtgaatgattcatcagatgtgccattagggcatcagtcttgaatcttatttagtattggtttagaaatggtggtaagtaaatatgcctgggattgatgaatcagaaaacctccagcattaagatgatgactatgatttgcagataacaataacatacacaaaaatctagtagaatcaaatgaacaaaaagttgagaactttcttaagtaagcaagttttgtaagatgctaagttgcaaaaagtataaatcaataacatatataaacacatgtttataaatataaagttataaactaacttctaactgtttagtatatatttggattgcatattgaatgtttacctgacttgatcatgtatgtatatgtgacatgaatggacgaatataaatgcataaggaaacaaaaggagcttgagagagggatggggtgaacaagaggttagggggtgatataatagatggtaataggaaagaaagtaagtacattttcaaagaaccacaaaataaaccgaaaaattcctaaaaaataaaaagctatattgaatattttaataaaaattgaatattgtaaatatattgattctgaattattttgtttggctcaatggtaaacataatttatgtattatagtagaaatcatggtaatcttggtccttgagaaaatacctgtaaagttcattttgagaaataacagaaccaccacaacctgagacatcccaggaaatacacagcaacggagcagctgatcaccagcttgtctgttcctctgaagacaccacaacttgaaggcatcccaggagttcctctgtacacagggcaactgggccacctacaccagtctgaagacctcctgggggtacagctcgccagagttctgtcgcacagagggaaacagaaaccagagtctataggccctcccagagaacagattcacacagaacagcagcttgactgctcctctcaagacaggacagtctgaaggcctcccaggagatctgctgcagccaaagtgacagatcagtagcttctctacctgtctgaagaccccacagtcggaaggcctcacaggaggtctgctacagtcagggccacaggcctaccaggatacctgaagcaacccatggacaaaagaggcatactccagagtcacccagaccagcaaataccagggataaccagatgtcaagaggcaagtgcaacaccataagcaacggcagccagtatatgtgggcatcatcaaaacccagtcctctcaccacggcaagccccgaatacaccaacacacctggaaaagcaggaagccaaactaaaatcttatctcatgaagataatagagtagagtcctttaaggaggatataaataactcattgaaagaaatacaataaaacacaggtaagcaggtaaaagcccttaaagaggaaacaaataaatacccaagatataagatacaatttgtaaaacacatgaaactcaagaagaacgacgaccaaagtgtggacactttgccccttcttagaattggaacaaaacacccatggaaggagttatagagacaaagtttggagctgagacaaaaggatcgaccagctagagactgccatacccggggatctattctataatcagcctccaaacgctgacatcattgcatacactagcaagattttgctgaaaggaccctgatatagctgtctcttggaggctattcttgggcctagcaaacacagaagtggatgctcacagtcagctattggatggaacacagggcccccaatggagtagctagagaaagtacccaaggagctaaagagatctgcaaccctacaggtggaacaacaatataaactaaccagtaccctccggagctcgtgtctctagctgcatatgtatcagaagatggcctagttggccatcagtggaaagagaggcccattggtcttgcaaactttatatgcctaagtacaggggaacgccagggccaagaagtgggggaaggaggaaagtggtggggggaggacttgggggacttttgggatagcattggaaatgtaaatgaagaaaatacctaattttaaaaaaggaaaaaaaaaaagaaatgcagaaaaacatacaatcaaacaggtgaaggaattgaataaagtgctccaagaactaaatgtggaagtagaaacaataaagaaaacacaaatggaggcaaacctggaaatggaaaacctaggaaagaggtcaggaattctgttgatgatataagtatcatcaacaaaatacaagagatagaagaaagaatctcaggtgtagaagatattgtagaagagattgacacaattgtcaaagaaaattcaaaatgtaaaaaactcctaaccctaaccatccaggaaattcagaacacaatgaaaagaccaaatctaagaataattggaatagaggagatcaaagattcccagctcaaaggacctgaaaataccttcaacaaagttgtaaaaaagaagcttccccaacctaaagaaagagatgaccataaatgtacaagaagcctatagaacaccaaataaatgtgaccagaaaagaaaatcttatcacataacaatcaaaacactaaatgcacagaacaaagaggtaatgttaaaagctgcaagggaaaagtgtcaagtaacttataaagcagaccaatcagaattatagcagacttcttaacagagacactaaaagccagaagagcatgggcagaggtcatgaagactctaagagaacaaaaatgccagcccaggttactataccgagcaaaactctcaaccagcatagatggagaaataaaaatattccaagcccaaatcaaattcaaacagtatctatgtaccaatccatccatacagaggattctacaagaaaaattccaacacaaggagggtacctacaccaaaggaaagacaagatattaagcatctcacaacaaagccaaaaggagagaaccacatgctcatagagccacatacaaaaacaggaactaacagccacatacataacaggaactaacagtcatctgtctttaatatttctcaatattagtggactcaactcacctataaaaagacataagctaacagactgaatacacaaacaggattcagcattttgctgaatacaggaaacataaacatagacactatcttactgtaaaaagaatggaagaaggtcttccaagcaaatggtcccaataaacaacctggggttgccattctaatattcaataaaatagactttcaaccaaaaattatcaagcatgatgtagaaggatacttcatgttcatcaaagggaaaatccaccaagagaaagtctcaattctgaacatctatgccaaaaatgcaagagcatccacatttataaaagaaactgtactaaagctcaaaacacagtaaaccccacacaataatagttggagacttcaacactccactctcactagtggacaggtcattgaaacaaaaagtaaacagagacacagtgaaactaatagaagttatcaactaaatggatttcatagatatctacaggacatttcatcctaaaacagaagaatacaccttctcagcaccacatgataccttttcaaaaatcaacaatctaattggtcacaaaacaaccctcaactgatataagaagactgaaaaaattccatgcatcctataggatcaccaccatggcctaaggctggtcttcaacaacagcaaaaacaacagaaagcacacatatatgtagaaactaaacaactctctacttaatgataacttggtcagggaagaaataaagaaagaaattaaagactttgtggaatttaatgaaaatattgacaaacccaaacttatgggacacaataaaagcaatgctaagaggaaaatttatagcactaagttccctggtaaagaaactggaatgacactagcaacttcacagcacacctgagagctctagaaccaaaagaagcaaactcacccaacaggagtagaaggcaggaaacagtcaaactcagggctgaagtcaaccaaatagaaacaaagagaacaatacaaaaaaaaaaaaaatcaacaaaaccaaaagcttgttctttgcaagaatcaacaagataaataacccaccagccaaactaactaaagggcccagaggcagtacctaaattaacaaaatcagaaatgaaaaggaagacatacaacaaaaatggaagaaatttaaaaaatcatcagatcctactataaatgcctatactcaacaaaactggaaaatctagttgaaatggatagttttctagacagatactaaataccacagttaaaccaagagcaggtaaaccatctcaatgggtccatatcccataaagaaatagaaaaagtcattaaaacctcccaaccaaaaagtccagggccagatggctttagtgagaattctatcagactttcaaagaaaacctgtcttagtcagggtttctattcctgcacaaacatcataaccaagaaacaagttggggaggaaagggtttattcagcttacatttccacactgctgttatcaccaaagaaaatcaggactggaactcaaacaggccagaaagcaggagctgatgcagagaccatggagggatgttacttactggcttgcttccgctggcttgcttagcctgctctcttatagaaccaagtttaccagcccagagatggtcccacccacaaggggcctttcccccttgatcactaattgagaaaatgccttacagttgtatctcatggaggcatttccccaactgaatctcctttttctgtgataactccagctgtgtcaagttgacacaaaactagccagtataaaacccaataccaatattcttcaaactataacattaaatagaaacaaaaggaacactacctaattcattctatgaagccacaattactttgatacctaaaccacacaaagacccaacaaaaaaagagaacttcagaccgatctcacttatgaatattgatacaaaaatattcaataaaattcttgcaaacaaaatccaagaacacatcaacatcataattctccaaaatcaagtaggcttcattccagggatgcaaggttggttcaatatatgaaaatccattaacttaatctactatataaataaactcaaagaaaaaagtcacatgatcatctccttagatgcagaaaaagcatttcacaaaatacaacaccccttaatgttaaaagtattggacagaccaggaattcaattctacctaaacataataaaagcaatttactgaaaaccaacagccaatatcgaattaagtggagagatacttgaagcaatcccaataaaatcggggacaagacaaggatgttcactctcctcgtatctattcagtatagtacttgaagtgctagctagaacaatttagacagccaaaagagatcaaggggatacaaattggcaaagaagaaataaaggtatcactatttgccgataatatgatagtatacataaaagacccccaaaattctaccagacaacttctccagctgataaaccccttcagcaaaatgcccagatataaaattagctcaagtaaatcagtggccttcctttatacaagtgataaacaggctgagaaagaaattagggacaaaactcccttacaatagccacacataatataaaatatcttggggtaactctaaccaaatgagtgaaaaatttgtatgacaataatttcaagtttctcaagaaagaattcgaagaagatctcagaaaatggagagatcttccatgctcatggattggcacaactaacacaataaaaatagccaaactaccaaaggcaatctatagattcaatgcagtgcctattaaaatcacaacacaattcttcaaagacatggaaagagcaattctcaaatgtatctggaaaggcaaaaaactctgaatagtgaaaacaattttttattagaaattttctttatttacattttaaatgttatcccctttcctcttctctcctctgaaaattccctatcctgtccccactccacctgctccccaacccacatactcccattcctggctctggcattctcctatactggggcatagaacctattgagaacaattcttaacaataaaagaatggctgggggaaaccaccatccgtgacctcaacctatactgcagaacaatattgataaaaacttcatggtattggtacagagacagacatgttgatcagtggaatagaattgaagacccagaaatgatccaacacatctacagtcacttgatctttgacaaagaagccaaaaatatataatggataaaagaaagcatcttcaataaatggagctcatctaactggctgtgtgtatgtagaaaatgaaaatagacccatatttgtcactttgcccaaagcttgagtgcaagtacatggaggacctcaaaaaaacaccagatacaccgaatctaatagaagagaaagtgggaatgaactttgaactcattggcacagggggcaatttcctaaacagaactccaatggcaaacacatgtaagatcaagaattgataaatgggaccccatgaactggaaagcttctagaaggcaaaggacatagtcaataggacaaattggcaacctatagattgggaaaaatcttaagtaaccccacatctggtagagggctaataatatccaaaatatataaagaactcaagaagctacgcacaaaaaaaccaaacaacccaatcaaaaaatggggtatagaactaaagagaattcacaacaaaggagtcttaaatggctgataagcacctaaagaaatgttcaaagtcactagtgatcagggaaatgcaaatcaaaatgacccttagattccaccctacaccaatcagtattgctaagtttaaaatcccaggtgacagcacatgttggaaaggatgtggaaaaagaggaacactcttccaatgctggtggggttacaaactggtacaaccactctggaaattaatcttgaggctcctcagaaaaatgaaaataggtctacctgaagacccagctataccactcatgggaatatacccaaaagatgccccagaggggcatgtgttccactatgttcagagtgactttgtgatagccagaagctggaaacaacccagatatcctgcaacagaagaatgaatacagaaaatgtggctcatttacacaatggaatactactcagctcttaagaatgaggacatcctgagttttgcaggcaaatggaactggaaaatatcgtcctaagtgagataactcaaacttaaaaggagatgtatggtatgtattcactaataagtagataataactaaaaattatagaatacccaagatacagtccacaggattcaaaaagttcaacaagctgaagggcccaagtgaggacacctcaattccacttggaaggcagaagaaagcaatcacgaagtgggggaggcagggagggacctgtgtgggaaagtgtatggggtagggataaaggggattatgatctggtattatgtgggggaaaaggactgaagccctgagggccagcagaaagaatagaaacaggcaacctcaggaggttggaggtttgggggaccctccagaatgtacaagagacctaggaggtgagagactctcaggattcaaaaggagggatcttagatgaaatactgtacaatggggagagggaacttgtcgagcctacctccagcagaaaacagggcatcaagtgagggaatggggttgccatcccagtcaaaactctgactcataattgtttctgtctcaaagaactgcagggatggatatgcagaagagcctgaggaaaaggaggtctagtgactggcccaaagtgggacctagctgaaggggagattctgacactattattgagtctatggagctctcacaaaagggacctaccatgactgtcctcctaaagacccaagaaacagctgaaagagtcagatgcagctatctgcgcccaaccagtggatagaatctgattacccctgtggttaaattattggaaagctggaagaagctgaggaggtgggaggctctgaaggaggaaacacagtctcaattaacctggacctcttagatctctcagatagtggaccaccaaccaggcagcatataccagctgacatgaggctcctaacacatatacagcagaggactgttgggtctggcttagtcagagaagatgcacctaaccctcaagattctggaggccccagggagtttatgggtctggtggcatggggtgtggggacatcatggagatagtggggcgggaaggaggtatgggatggggtcagtcagaaggtggaccaggaggggaataaaatctggagtgtaaaattttaaaaaattaaattaaaaaaatttaaaaggaaaataaaagataaaaatatttaaatatttttcaaaatgtaatgctggggaattatttttctatctatataccaaaacagttataaactctattatatattatgcaaacagaacattgctttggtggtgaagaagtaatatgtttattatattgagtctttttatttataaacaaagtgtatctcttacaaacaactcagaaaaagtttgtcaagttgaatcatcaactctccattacacagcaagaaaaaaagaaaagaaaagaaagaaatgaaaataacatttaggtaagactaagtctattttaaatagcttccagattacaaattataatagtgattataactaaaatataaaacaaaatgaaaccaataaagcttaccttaatgggacagatatgtagtctcacctttactagtatctgaggtggagatcatcaaagtcaaggtcttcctgggcttcagatagagctcaagtcttgcctgaaatcttagctagacactttcacaaaatagaaaatgggaaaatggggctgagggtgtgaattaaattagtggtaaagcagttggtttgggtctgtgcagctctaggttaagtttctacagacacacaaacacactattaacaatgaaattaactgaggaatgaaggatggacagaaataattcaaatggtttttactaacatggaatctagtttgtactcactggtgtaagttaacactctgacattaaatccatcaatagattgatgaatataatagattgcctagcccttttgagattatttgataaatttcaaattgtacttgtcagtcaactaccaaatgttcactttgcatatgtgcagagcttgtgattaggactgagttgtacttgtctatgcctgggtccagcctttctagagtggtaatttacagaagggccttctgtacatgttagagtaaattctaaagcaatactagctttagaatttttattagaacaagataacacaatcaactaaaattccagatgcatatatcgtaagcgatgacgaatgttgcattgtgttattcagccattaaaagttttatgtgtgaaaaattcttaaagcattaggtttaatcatgggttgagaggcaacctatacaagtaaattatatagttgggtttcagtgttttgaaaaatctttttgtctatacagaaagattcaaagtgtatggcaaaaaatgaagaggctcagatcttcatttctagtgaagatatgagtgattttattttgaattaactaaagttttatagctaatatatctgcatagtgaatactaaagacatttgcttcctccctacaagctgagaaaaaaaaaaaagaaagaaaagaaaaggtctgagtgaacttgtggctaagttcttgatctcaccagtttcatcatctcctgggttgggaaacgtttcattggaactcactgtccaccttgatacatgtcacagcaggtatgcaacagttgcctgatcttaccatgattacctgctaaaaaacacacaggcacctgtcattaaattcagctttcacttagtttcattcacttggtttcaattttcgtccttaattttgtctttttgaaataattggtcctttattcttaggtttgatggtgtagttttggtattttctgtcatctttgtttgtaagtgacttttttttcaagataaattttctccatgtagccctggctgtcgtggaagggaacacactctgagagcagagatccacctgcctctgcctatgtattgctgcgattaatgccacgcaccactactgccaggctgtaagtgaaatgtttcctaggaatttgacaagggctactaaactgtcaaaaaccttattacttatgactcataggcagaaagcatagaaaaagcctgagttgtttaccttcctgtgtaaatgcctttccttttgatttatttatttatatgtttatttattatttctagagttgaaattagcttccaggaaacactaaaattgtaccttcaaacactaaaaacatgtaaaacagtgtaaactggctacacattaataaagaacacacacacacacacttgtaatatatgaaggtagctgccgcagtactataaaaagctgtacataaacgtaaacgtttagtctaagacgctgacagttggctataaaatgtcacttttcctcagttatgatctgatgcagaaatagtaacaatacaagtagaaacttgcacccatctaatgtcagtatttaaaatacatatcctgcactggtcacttgtatacagaaagctcacttcatccaaagggaacaaaaataactacacaggatgaagagtgggaggcaagaaaacagggctagcatatttcaatgagcaatgctcacaggctcagaagaccttcaacaatcaacagtcccagggtaagggatggaaaacagggagggataagttgaaggtttaactggaggccgggttagtggattagtgtgaggagttagtgaattggaaagccatatgtccagaggaagcctggctatgatctgggctaaattgtttcttaggtgacctgaagaaaatattcagaggccagtaaatgtgtttccagataagctaaatggggcagcacaggttgcagaagcttgaaagtatctgctctggtgggaattttgaatccatgttgtatggaccggaaggactatggtgggggcagtaggttcctttttcggggtggggggtggatttaggaggggtaaagacattggttttatgttgcaaatcaaatgatttaaatcataatctgcaaagtctatttcaaacttatgcttacctcggaaaattaaatctctctacatttgagttgaaagtaaactgattttaattgtttttgcataactgtgggtaacagatttaaagaaagaaaggaaaagccactgagtacatggcaagaatcagcaaacacatcaaataaagcaacatgctccccagaaacaccatggcatatgctgacagttacaaaagaatggctgctgttttcatccttcacaccagaataattttttcagtacttacctcccatgtgtagagagggaaacatatggggctttacataatcataagcacaaacaggtggctacttaggtacatttaatttgcaggcaacatcaatactgaacaacacaaccagccccacatggctcccaaaaatcttgccatgaacattccattagcaaattaagatcattaaaacagagggaggagcgctcccacctccaccccctaatggcttcaactacttttcagaataaaatatgttttcaaaaacaccttgacattttgtggcatcttttgttcagggcaacttgggtgactgtgtataatgtataccttgtgaatagctgcaagtagcacatgtgcatttaaatgtgcatacatctttatgctctctaccattcctatttatgacagaaaattatggtaggtaaattttccagccctttatcaaaccataggttcagatccctgtaagcaacttggaaatacttctccaaaggtgggccacataaacatgtcacccgaggcttgcttctattttcaaacactggtaaagtctggaaattattattactgggaaaatttgctctctctatgctaggggctgagtggcagcttctgttttttgtctattggacccagcctgggaaatttagtgtgctttagttggcactgaacttctagtgatattacaagatctgaccttacaatcagccttcaatggctttgaaccacagagtgaaaaaaatacaagagaaagagtaaccactgtttctttgttaacaatgctacctgttttagtttaagtatcataataaccttataacgtaggtgatatcgtctcccttactttttagaagaggacaatgtatcaccaagggtttccattctcacacatactgnnnnnnnnnnnnnnnnnnnnattggacccagcctgggaaatttagtgtgctttagttggcactgaacttctagtgatattacaagatctgaccttacaatcagccttcaatggctttgaaccacagagtgaaaaaaatacaagagaaagagtaaccactgtttctttgttaacaatgctacctgttttagtttaagtatcataataaccttataacgtaggtgatatcgtctcccttactttttagaagaggacaatgtatcaccaagggtttccattctcacacatactgaagaaagggctgggctagacctgaaccccagttttcagaactagccatccctacctgaaaaccctagctcttattgtccatgaacttaagattctagtgcccaaagtccatcaatctatggcattttgaagaccctccaacaaaacttagagttatattctgaggcatggatgttctatggaaattctgtcctgtcctgaaaaagataggcccgtgtggattgagaagacatcaggagttatgttctcacaaagttgtttctgaattcaggtttgttactcactcctatcttaccactaggaaagagaatgttaacatagacaagtctatatgctacccttattacaacagacccttagttatgggagtcagcttatattatctgaactgacattatgaattgtattggtggctaaacatctcacacttattggacaatgtccttccaaagaggttaaatgcctctgagaaagagatagtttttggtggtgtccatttaccgcaatgcaacagttgaaccaaagaaatgaaaatgaattgggaggtttttttttaatctattctctacctctggataaaagacctattaaaaaactttatattgtcattgcagaccatcttatgtcatgtaatgatgcatggacataggatttctacagtcaggcttaatcttacaggcttcatcttactgacctgttcaactgaacttccatgtgacacacttggacttgctcctccttccttattgggttcttcttgagactttctgcagctggtctagtcaagaggatgggaatcaatcgtgaagaattttctatgaaaattgtagactccatcataggatcatggtgttccacttttgttctggattaggaaatctggggaagattagcatgtttcggtcactatgtgctcccgcatttatgtaaggaccttaagcattttgttttataagataatccatgtacacagttataacctgagcttgaccatagattcatatgctagaagttctacaaaaacaccatatttgtggactctttgtaaaagttttctcgaaaaaccaaaaagaaaaagttttcatagggatacacagatctactacaaaatgtcttagagatgcaacagattgatagaaaaacagcaagatgtgtgtgaagtgagaggtcttagagactaatactgaataatatggatgtttaggaatttgattgtaaatcaaaccatctttactgattatctaagggagcccctgctttactgattgtgagacaagattcacagaaatctaaaactggacagtttaactacaagccagctctttcacatgtatcatccctttaaaaaaatttaaatacacttctaacacacacacacacacacacacacacacacacacacgcacgcacgcacgcacacacacacacacacacacactttggtggtaaaaagccacagccaatggcatctctttctcagaggcacttgaattctctagaaggacattctacaacagacttgagacacttacccaacactttaattcataannnnnnnnnnnnnnnnnnnncataaacatgtcacccgagcttgcttctattttcaaacactgggtaaagtctggaaattattattactgggaaaatttgctctctctatgctaggggctgagtggcagcttctgttttttgtctattggacccagcctgggaaatttagtgtgctttagttggcactgaacttctagtgatattacaagatctgaccttacaatcagccttcaatggctttgaatcacagagtgaaaaaaatacaagagaaagagtaaccactgtttctttgttaacaatgctacctgttttagtttaagtatcataataaccttataacgtaggtgatatcgtctcccttactttttagaagagggcaatgtatcaccaagggtttccattctcacacatactgaagaaagggctgggctagacctgaaccccagttttcagaactagccatccctacctgaaaaccctagctcttattgtccatgaacttaagattctagtgcccaaagtccatcaatctatggcattttgaagaccctccaacaaaacttagagttatattctgaggcatggatgttctatggaaattctgtccagtcctgaagtctccatgtgtctttccatgacataaaagataggcctgtgtggattgagaagacatcaggagttatgttctcaaaagtgtttctgaattcaggtttgttactcactcctatcttaccactaggaaagagaatgttaacatagacaagtctatatgctacccttattacaacagacccttagttatgggtgtcagcttatattatctgaactgacattatgaattgtattggtagctaaacatctcacacttattggacaatgtccttccaaagaggttaaatgcctctgagaaagatagtttttggtggtgtccatttaccgcatgcaacagttgaaccaaagaaatgacaatgaattgggaggtttatttatttatttatttatttattttcccattttttattaggtatttagctcatttacatttccaatgctatcccaaaaagtcccccatatccacccacccccactcccctgcccacccactccccctttttggccctggtgttcccctgtactggggcatataaagtttgcaagtccaatgggcctctctttccagggatggccgactaggccatcttttgatatatatgcagctagagtcaagagctccggggtactggttagttcataatgttgttccacctatagggttgcagatccctttagctccttggctactttctctagctcctccattgggagccctatgatccatccattagctgactgtgagcatccacttctgtgtttgctaggccccggcatagtctcacaagagacagatacatctgggtcctttcaataaaatcttgctagtgtatgcaatggtgtcagcgtttggatgctgattatggggtggatccctggnnnnnnnnnnnnnnnnnnnntacacacacacacacacacacacacacacacacacacacacacgtgaagatatatataaaagaattcttttagaaaaaaatttacctgcttctattcgtatatattggatttacttgtatgtcaggggtaaatgtttctttatattaacagtatataaaatcaatatttatatttcagagtattaaggaaatttcagccacttatttcattattctaccttataatgtggctgaagaaaaacttacgtgtgagtagaaatgtcagctctgcctctctggttggctttgttcctatgggttggtgttggtattattttcagtgcatggttcttgcagggcatatgtaaaggtattcagctatttaacgaggattgctgtatttggaacctataatcatatatgtaaaaaatctgcttaaatatggctagcaacctaccgcacactgaatgtacatgaacttggttggtcagtactggtgcttcaccctgctttatatatcactacagttgagccagaatactacctcgtactaggggagccagacaatgctttaaaaatcattttcttctcctgatttgaaaattatctttcacagctcgatgtcttcctacaccccaaagggaagttagataccaacatggaaacaactcttgtcaacttttgaaaggcttggcagcttaagattcataataataatgaaaagttgaaatgtgtatctgtgattaagtcattgtacttctgaaagccaaaaacattactatgtgtctatgagttgatgataagagaagatttattcaaaaattcacaaatttatttacgaaacattcatgttttatcaatgtaaacagtcttacattgctactttgaaagtgaaattgtatcatgcatgcaaattgatgaccatgatgagctgttaacaagttaacatctctaatactgcagatatgagatgatgaagaaaagtagcaaaatttcatttcaaaattatttattttagagatggagggaataaatttagttgaagctaggaaagaagcttgaccattagattaaaataaaaagaatatgaatgttttcatgtggtatattcagtgtcatgctctgatctattatgaggaaatacaacttttaaattcattttatatttgttgaaacttgattatagagaagagaaaatggtagaaaactgtctgatgagaataaattctggacagataactgagtgtttttctctccctgggtttgggtgaggctggtctgtgcaaagggaatgtcgcccgatagagctgcacacatgcctaagactcagaataaacacactattcttgtgaacaatatctttgtaagtcacatgtgtaacagggagacagattggattggtggctaagtgcagagtcacaactctggttagagattttggggccatgattaggctgtgaaaattgaaaaagttttccttgtttcccagtaacattttttatttactgctcccacaagataattgtgaagataaatgtcatatatgaaaaaaaatgctcagacttgtatatctctctttaaaaagtttcacttgttagtgttttgaaaatcattaagagctggttgaaggctgacaaggtgactcagtgtgtactggcaattgttgccaagtctgatcacatggctttgatccatagtacacacatcatagaagaaaagaactgactggctcaagtgcccccagccacacatgtcatggcattggtcttctcatacatataagtacatataaatataatagaaaattataagttataactctatcaagtgtaaaagatttgaaagaataaattcacctattaactagtttcaacacttatttcattttcttatgttatattttcaagttgcatgtttgtttcttaaaataaaactcttaatttatgagtaacagtaacaaccaagaagatggctcagcagggaatttcactagtcatcaaacatgataacctgagtctctggggtccacatggtaaaaagttaaaaacctatctgctgtgggttacctgctaacttccacatggcatgtgtgtcacacacacatgaacataccataagtaaatatatatgaagaataaatcacacacattattaggaaaaagcatgtccataaaaggcctctaattatgactatatcacaaccatatccctaaacagattgaaaagattgtatttataattaaacacacacacacacacacacacacacacacacacacacacacgcatcatatgcttatacctgcacaaaaatcagtccaatcacgctggacattggtggcgcacacctttaatcccaggaggcagaggcaggcagatttctgagttcaagtccagcctggtctacagagtgagttccaggacagccagggctacacagaaaaaccctgtctcgaaaaaaaccaaaaaaagaaaaaataaaaaagaatcagtccaatgaataatctaaggtaagttccataaagctttgtgaggagcactgatatactaggatacagtatgtcataatttattaatgtgtgttttcccccaagaactctgtaagagaagaaaaatgggagattgtacatgtcaaattctcctttggagagtcataaggcttcaaatgtagctaagaattctgacattaattagaacaatgaaattgttgttcattatggtaaagtttccacaacatgaaatacattttaaagcaaatggttcaactatatttagtacattcaccctctagttgcagctgtacagcttttcaatcaaaatctgatcaaatccatttagttctgggaaatgcattcaattctttaattcagtgtgtctccaggagaatacattcctggaaaattaatcaagtcttctctttttaaaaattagaaaaatgttgggaatataaattcctgtctcaaaaattacattggtagtcaggacagcacacattgtcatcagatttcctatttctaaggataggatattgagtttttcaagacgcttcctcttgtttccatttgtgttcctgttcagatgatttaataatttacaagtatattctgacatttttcctggagaaatttaagattcaaataagcatcttaggctgaggatttagcacagtcaataaactggttttgtagcaaccacgaggccctgagttctatcccaagacagttggggatgacagtgtgaacctttaatccctggtcctgagaagtggagacagagaaatccttggtactcactggatagccagtctcgcccaattagtgagctctaggccaaaagaagacattattacaaagggcaaggctcttaaagatgacacagaaatagtcctctggcctcccacacatgcacatgcacactcacgtctgcacacttatgtctacacacatgcataaaataagtacttaatatttaaaagttatactatgcttattatgatatggagttattattttgattttcctacgagaactttcattataataatgcacacaattctgttcttaggtctctttaaggtcatggctgataaaactccatacctgtcaattgaagaaatcacaagaaccgttaatattggacccagcagactaggtcatccttgcttttatcacctgaaggatataaaactagagaatctcattattaagcagggtgagccaatccggttcaactcagttgaagagattaatggagaaacgctggtgaattgtggtgtggtaaggaatcatcagagccactcatttactttgccattgtcacaagaaggagaattttatgagtgtgaggatgaacatatctataccctaaaagaaattgttgaatggaagattcccaagaacagaacacggacagtgaaacttacagatttctcgaataagtgggactcaaccaatccattcccagaagacttttatggtacactgattctcaaacctgtttatgaaatccaaggtgtgctgaaatgtaagtatccactgaggatgctatcctgtgtgagtttgcattgtgggatttgggctagagaagcttttagaacatgaagaatggaactctgtccctatcattcattagttctcttagacttaggttctccatcgatacatccaaccacagatagcactgtcttaaagagaaaattatgaagtgagtatgcagatatactataaaccatttgatgttctatccaagcataagctgctaaactatcagatataggtagcctaaaatgcttgctatttttattactagttattaagagtttatttttagaacaagaatcagaaatcagttttctttacagaatcccttattcttacttcatgacaacttttgtttcaaactcttaccaatttatgactggtcacaatttcttttaacacagattccttgacttaacaaaaatgatatgttaaagtaattttcatattggtgtatttcaaaatgcaatcttcattgttattttcttatgttttaaaatatctacaaagaccattattattctaaatatttcaaacttagggaaaccagaagagtattaaattctgaccctggttcaagcccaacatgatagcatgcctcgtaaccctagcttctctcaatgttgaggcaggagtaaggtagttcaggcctgctcaggtgacacagatagttcaaggccagtgtggtcaacttagcaagacacaaaacaaaaaataaaaaggagaagagaatacaactgaggatcaggcagttacttaacacaagtgagcaccaaggttcagtaactttctaaatgaaagctctggataagctgtgcttgccctcttggacgtgttttcaaagtaaattaagacagtactaaataacttaagatcatccaacagaaacaaaatatattgtcaaagctacttcctcaaatatctcaaaattggtttttctctgtcctcattgccattacatacttacaaaaggaaagcatatggcatttggtaagttttagaattgtgtgttgaattctatcatgctaagaagtttaattaaaatttgatcaattcattttgaactaaaggtatgggaagagtttgcatggtttgattttataaaatattgacgctgcagcaaattttagaacttacagtagtgctcagcttgctgcctcaaagcaggcaactgaaatggatgattgagtttttctgattgtttatgaataatagataggattttattattttcaaatcatcttatttttctaaaattatcatcttctacctgtcataggcttacaaatgagaacaaacccagagcctaaacgtgtggagagagacattagaacttttaattaatttgcattaggaatcaaatgttgatggatgaatttgatgtagtcaaaccatgcaaaactagacaaaattaagcaacttgtggcagagtgagtaagaaagtgagtggaaattcattacagctctataaaaaaaaaagaacagagaaaaacatgaagatacacagggcacatatgtgtttgttggggaagggcagtgaccattcacagaaagtcataaagacttcccaaagagataaacttgaaatttgtcctaatcaaaagagactgctaagctggaagatgtagcacatgtgagcatagtgattctagtggagaaatcggctggatgttacagttcttttcgatggacatagcaatgggaaagacagaaaacagagatgtacttagtatgtgcaagatctagaaatctagtggaagtcatcttggtcaaccttaatctcagccgttgattttatctactggttggatgaatatgcattcattaaatataaacagcagaagagtaagttttattagaattgttcctgtagatttaaatagagttttctgccacttaaccaagaaccaacctttggttaaacatccttcatgaaatgtttaagcatagtttctagtatgtattaaaataaaaattccatgttcattattctgggcaatttttctttaggaaattttaaatattacttatctgcatttggtctgatatgagcttgcatgtatacagactgtttcatgaaaacaaagcaggagaacccatcataagtgacacattttaaaaactttgggttacagatattttcctctaagtatgcaaagatgctttaactttgttttggtcttctgcattatttttttgaaggaggttagatgctccttgaatttaagagacattgcacagttgcttttactgtgcctgagtatcaggcagagtctaaacactttaggcttcagtgctttccccaccaaagtgacaggaaaaagaactggtctggaaaagataggatattttacagtaaccttagtggaagatgaaaaattatctaaatagctatgaaatattgatttcctgaaaataaaaacacgacaagtaataaaaagagggaatatgaacattttactcttgtcactggtttttaatatgttattaatgtgacaatgtgtaacccagaaaaaggaaaatcagtagaaataaattacatctctttgcatttgagtcatgacctcattgggtgtcaaacaacccttttacaggagtcacctaaaaccgtcaggaaatacaaatgtttacattacaagtcataacagtagcaaaattccatttatgaagtagcaatgaaaataattttatgtttgggtcaccgcagcatgaggagcagtattaaagggtcacagcattgggaatgtggagagccaccatgtcagagggaaacacatgcttctggattctggtcaaaattcctttataggcttaacaccttcccggctttcaggcacactaagacattgctcaaagagttaccacattttcaggagaggtaactatttaaatcctgtaactactggtctcataaagtagttccaaaatgtgtttttgcttatttaaaaaatattaaaattcatgtgatgaggtacatggaagtttcagtattgacaaatgaaaaattgaaaatagaggtcttgtatatcttatgtcttgatgcatggattaataattcgatccttcttaactgaaaaattccatcatcacataaattcttttatcttttggaggaaagcttaatgctgcccaaagcttggtggttggttcagtcttcatgaagatatataaaaatatgaactcgtgtcataagctcaaaccactaagcaaaaagaagactgagcaaaattgttttgaatatcatatataagattataaataagtaggagaaaatactctcatttgtagtttcctaatgccttggacttgaccatgctgtttccctgaagcattctccttgtttctgtcttaatttaaagaagacatttccaacttttataaaaaccaagaaacctaaataacacccgagaaagatatgacaaggttacatacaaactttatagctttgactgttctccaatttcccctacattctcctactctaaggtaactcttgttaatattttctcccttgcttcctggtatttgccttcctgcttccaaatgataggaacatgagtggattttcaagtcatggaccattttagatagtaacaattgccactatatttgagaaaagaaagaaaacgaaggaaaagaaaataacctatctatgcatttttcccatagtgaagccatcagtggatttctctgagatataatttccctctgtggccattccttctggagttctcatccttgtagtccaaccttaatctgttgctatatagataggggcatccattacaactcaccctggcggtgccttcttctgccttgctcttgtgtgaagtagctatttccacaatcaataaggaatctcttctttctttatttttctctagttctgacaagacccatcctctttatgctttctaagtcaagaatctgcaggtttgaaaactctgtcccctacatccacacatgaaatgggcagtttagccaccatgaaattctaggtggataatgtgatttgttaacatctttgctcctctttggtcgttactgctcctctttggtattacctttgagcgactgtggcattctatggtcttgactgtggttgtggcaggtttgaactttcaaagtgatgacaattttgcatttggtaacttaggtgtttcttttctgaaaagactttttgtgttaatgccttctcagtaatactttgtggtctgcctgtctttaactttcagctgcatatcaaaacctcaacccctaactaacactttccccttttgcctccctgacttaatgtaccttcatgaaaagttccttcacacaattctatcatcatgatgaattttaaagttcagctttcatatttttaccttctaaaaattatgtcatatatagttttaaatgttagtcaccccaatttagctttaatgatgcagtattctaatccagagaaatttctatattttctatagttttaatgcatttatatctttcatttggtttcttgttttgttttgtcgtccttcatgctttgttctatcgttttagttaagtggttttcttgagttcctgctatttgccatgtttccttatttagatgtgagatgctttaaacaaagcttcagttctgtagactctctgtgttgatgagttctaatcttctccatgtagcagcattactgctccacttctattatctttcctctggaatttacatagtttcacgaagattttatcctgctgttttctgtggttatgtagttattgaatccaaatgatgagtagctgaaggaatcaccatgatccctatggctttagataatgtgatggtttctatatgcttggcctagggactggcattattggagtaggtgtagccttgttggagtaggtgtgtcactgtgtgcatgggatttaagaccctcctcctagttgtctggaagccaatcttctctgcagatgaagatgtagaaatctcagctcctcctgcaccatgcctatctgaatgctggcatattcttggcttgatggtaatatactgaacctctgaacctgtaagccagccccagttaaatgtccttataagagatggcttggtcatggtgtctgttcacagaagtacaaccctaactaagacagataatagtgttttcaggcttacacttccttcttgtggtccaggattatgaggtcctgtttcctatttagaaaggttgtagtagggttacccatcatccctaaagacctgagtttaatattcagacatttgaataaattcttttattttaaaatttttattagatattttcttcatttacatttcaaatgctatcccaaaagtcccctatacctccccccaccctactcccctacccacccacatccatttcttggccctggcattcctctttactggggcatataaagtttgcaagaccaaggggcctctctttccaatgaagaccgggtaggccatcttctgatacatatgcagctagagacatgagctctgagggtactggttagttcatgtagttgttccacctatagggttgaagaccccttcagctccttgggtactttttctaactcctccattgggggccctgtgttccatcctatagatgactgtgagcatccacttctgtatttgccaggcactggcatagcctcacacaagacagctctatcagggtgctttcagcaaaatgttgctgccatatgcaatagtgtctgcatttcatggctgattatgggatggatccctaggtggggtagtctctggatggtccatccttttgtctaagctccaaactctgtctctgtaactcattccatgagtattttgttccctattctaaggaggaatgaagtatccacacgttggtcttccttcttcttgattttcttgtgttttgcaaattgtatcttgggtattctaagtttctgggctaatagaggaacactcctccattgctggtgggattgcaagcttgtacaaccactctggaaatcagcctggtggttcctcagaaaattggacatagtactaccagaagatcctcaatacctctcctgggcatatacccagaagatgttccaactggtaataaggacacatgctccactatgttcatagcagccttatttataatagccagaagctggaaagaacccagatgtccctcaacagaggaatggatacaaaatatgtggtacatttacacaatggcatactactcagctattaaaaataatgaatttatgaaattcttgggcaaatggatgtatctgaaggatatcatcctgagtgaggtaacccagtcacaaaagaacttacttgatatgcactcactggtaagtgaataaattctttttaaaacccctccatttattttcacatttaaatggcttagatgtctccaattcttaaacattttgggaattctgtgggacttacttttatccatgtttctttgctcaggcacatgctcattccttgtcctggtcaacccaaacagttcactttcttacagctgatctctgtctccttcacaatttactttgctgatgtcagatttgctgactctaactctgttttgttttgtttgtgttggttttctctctttctgtgttactattttatccttgtagtaagtttgaagtataagaggattacaaagacatattttatgcataatcctttcttgctcacttaacttagtccttggccagaattttggctagacctactgtaaattctgaaaatactacatgatattattgtaaatattactaaacacttgtgcatacttgaaataaagttgaaaaaaatttacaaaataattagcaagaaaattcaagcaaaagtgatagaactagaaggcaaactttaattgaagagtctggaacaatgtagaactgccaatgagtaagtaatcattgccattcctattaaataccaacatagtataaatataattggggagaaatcagagctttaaattataacaacttggttcatgtagaaactctatatccgctctgaggcggcgccattttcggctacagacaacctgccaccttcctggtgagagcacaggggtccacacggcccgagaggcttctgcctcatgttccgcgggggccaccttgattctgggactccgcagcgggcagtctgcaggccaaagcaacacggcttctgggaaaaatcctgttttgggccttcatcttcggccaggaggaggtccaaacaccagataactgtgcacctccctgaaagaggagagcttgcctgcagagactgctctgaccactgaaactcacggaagagagctagtctccctggtctgctgatatagtgtaacaaaatcaccagaggaacaatctctaaacagagacaactataacaactaactccagagattaccagatggcgaaaggtaaacgtaagaatcttactaacagaaaccaggactactcaccatcatcagaacccagcactcccacttcgcccagtccagggcaccccaacacacctgaaaagctagacctggatttaaaagcatatctcatgatgatggtagaggacatcaagaaggacttaaataactcacttaaagaaatacaggagaacactgctaaacaagtagaagacattaaagaggaaacacaaaaatcccttaaagaattacaggaaaacataaccaaacaggtagaagacattaaagaggaaacacaaaaatcccttaaagaattgcaggaaaacacgaccaaacaggtgatggaattgaataaaaccatacaagacctaaaaagggaagtagacacaataaagaaaacccaaagtgaggcaacagtggagatagaaacactaggaaagaaatctggaaccatagatgcgagcatcagcaacagaatacaagaaatggaagagagaatctcaggtgcagaagattccatagagaacatcggcacaacaatcaaagaaaatggaaaatgcaaaaagatcctaactcaaaacatccaggaaatccaggacacaatgagaagaccgaacctacggataataggagtggatgagaatgaagattttcaactcaaaggaccagcaaacatcttcaacaagattattgaagaaaacttcccaaatctaaagaaagagatacccatgaacatacaagaagcctacagaactccaaatagactggaccagaaaagaaattcctcccgacacataataatcagaacaacaaatgcactaaataaagatagaatactaaaagcagtaagggaaaaaggtcaagtaacatataaaggcaggcctatcagaattacaccagatttttcaccagagactatgaaagccagaagagcctggacagatgttatacagacactaagagaacgcaaattccagcccaggctactatacccagccaaactctcaattaccatagatggagaaaccaaagtattccatgacaaaactaaattcacccattatctctccacgaatccagcccttcaaaggataataacagaaaaaaaccaatacaaggacgggaaccacgccctagaaaaaacaagaagataatccctcaacaaaactaaaagaagacagccacaagaacagaatgccaactttaacaacaaaaacaacaggaagcaacaattacttttccttaatatctcttaatatcaatggtctcaactctccaataaaaagacatagactaacagactggctacacaaacaagacccaacattctgctgcttacaggaaacccatctcagggaaaaacacagacactacctcagagtgaaaggctggaaaacaattttccaagcaaatggtctgaagaaacaagctggagtagccatttaatatctgataaaatcgacttccaacccaaagttattaaaaaaggacaaggagggacacttcatactcatcaaaggtaaaatcctccaagaggaactctcaattctgaatatctacgctccaaatgcaagggcagccacattcattaaagacactttagtaaagctcaaagcacagattacacctcacacaataatagtgggagacttcaacacaccactttcatcaatggacagatcgtggaaacagaaactaaacagggacacagtgaaactaacagaagttatgaaacaaatggacctgacagatatctacagaacattttatcctaaaacaaaaggatataccttcttctcagcacctcacgggaccttctccaaaattgaccatataattggtcacaaaacaggcctcaacagatacaaaaatattgaaattgtcccatgtatcctatcagaccaccatggcctaagactgatcttcaataacaacataaataatggaaagccaacattcacatggaaactgaacaacacacttctcaatgataccttggtcaagcaaggaataaagaaagaaattaaagactttttagagtttaatgaaaatgaagccacaacgtacccaaacctatgggacacagtgaaagcatttctaagagggaaactcatagctctgagtgcctccaagaagaaactggagagagcacatactagcagcttgacaacacatctaaaagctctagaaaaaaaggaagcaaattcacccaagaggagtagacggcaggaaataatcaaactcaggggtgaaatcaaccaagtggaaacaagaagaactattcaaagaattaaccaaacgaggagttggttctttgaaaaaatcaacaagatagataaacccttagctagactcactaaagggcacagggacaaaatcctaattaacaaaatcagaaatgaaaagggagacataacaacagatcctgaagaaatccaaaacaccatcagatccttctacaaaaggctatactcaacaaaactggaaaacctggatgaaatggacaaatttcctggacagataccaggtaccaaagttgaatcaggatcaagttgnnnnnnnnnnnnnnnnnnnnnnnnnnnnnnnnnnnnnnnnnnnnnnnnnnnnnnnnnnnnnnnnnnnnnnnnnnnnnnnnnnnnnnnnnnnnnnnnnnnnnnnnnnnnnnnnnnnnnnnnnnnnnnnnnnnnnnnnnnnnnnnnnnnnnnnnnnnnnnnnnnnnnnnnnnnnnnnnnnnnnnnnnnnnnnnnnnnnnnnnnnnnnnnnnnnnnnnnnnnnnnnnnnnnnnnnnnnnnnnnnnnnnnnnnnnnnnnnnnnnnnnnnnnnnnnnnnnnnnnnnnnnnnnnnnnnnnnnnnnnnnnnnnnnnnnnnnnnnnnnnnnnnnnnnnnnnnnnnnnnnnnnnnnnnnnnnnnnnnnnnnnnnnnnnnnnnnnnnnnnnnnnnnnnnnnnnnnnnnnnnnnnnnnnnnnnnnnnnnnnnnnnnnnnnnnnnnnnnnnnnnnnnnnnnnnnnnnnnnnnnnnnnnnnnnnnnnnnnnnnnnnnnnnnnnnnnnnnnnnnnnnnnnnnnnnnnnnnnnnnnnnnnnnnnnnnnnnnnnnnnnnnnnnnnnnnnnnnnnnnnnnnnnnnnnnnnnnnnnnnnnnnnnnnnnnnnnnnnnnnnnnnnnnnnnnnnnnnnnnnnnnnnnnnnnnnnnnnnnnnnnnnnnnnnnnnnnnnnnnnnnnnnnnnnnnnnnnnnnnnnnnnnnnnnnnnnnnnnnnnnnnnnnnnnnnnnnnnnnnnnnnnnnnnnnnnnnnnnnnnnnnnnnnnnnnnnnnnnnnnnnnnnnnnnnnnnnnnnnnnnnnnnnnnnnnnnnnnnnnnnnnnnnnnnnnnnnnnnnnnnnnnnnnnnnnnnnnnnnnnnnnnnnnnnnnnnnnnnnnnnnnnnnnnnnnnnnnnnnnnnnnnnnnnnnnnnnnnnnnnnnnnnnnnnnnnnnnnnnnnnnnnnnnnnnnnnnnnnnnnnnnnnnnnnnnnnnnnnnnnnnnnnnnnnnnnnnnnnnnnnnnnnnnnnnnnnnnnnnnnnnnnnnnnnnnnnnnnnnnnnnnnnnnnnnnnnnnnnnnnnnnnnnnnnnnnnnnnnnnnnnnnnnnnnnnnnnnnnnnnnnnnnnnnnnnnnnnnnnnnnnnnnnnnnnnnnnnnnnnnnnnnnnnnnnnnnnnnnnnnnnnnnnnnnnnnnnnnnnnnnnnnnnnnnnnnnnnnnnnnnnnnnnnnnnnnnnnnnnnnnnnnnnnnnnnnnnnnnnnnnnnnnnnnnnnnnnnnnnnnnnnnnnnnnnnnnnnnnnnnnnnnnnnnnnnnnnnnnnnnnnnnnnnnnnnnnnnnnnnnnnnnnnnnnnnnnnnnnnnnnnnnnnnnnnnnnnnnnnnnnnnnnnnnnnnnnnnnnnnnnnnnnnnnnnnnnnnnnnnnnnnnnnnnnnnnnnnnnnnnnnnnnnnnnnnnnnnnnnnnnnnnnnnnnnnnnnnnnnnnnnnnnnnnnnnnnnnnnnnnnnnnnnnnnnnnnnnnnnnnnnnnnnnnnnnnnnnnnnnnnnnnnnnnnnnnnnnnnnnnnnnnnnnnnnnnnnnnnnnnnnnnnnnnnnnnnnnnnnnnnnnnnnnnnnnnnnnnnnnnnnnnnnnnnnnnnnnnnnnnnnnnnnnnnnnnnnnnnnnnnnnnnnnnnnnnnnnnnnnnnnnnnnnnnnnnnnnnnnnnnnnnnnnnnnnnnnnnnnnnnnnnnnnnnnnnnnnnnnnnnnnnnnnnnnnnnnnnnnnnnnnnnnnnnnnnnnnnnnnnnnnnnnnnnnnnnnnnnnnnnnnnnnnnnnnnnnnnnnnnnnnnnnnnnnnnnnnnnnnnnnnnnnnnnnnnnnnnnnnnnnnnnnnnnnnnnnnnnnnnnnnnnnnnnnnnnnnnnnnnnnnnnnnnnnnnnnnnnnnnnnnnnnnnnnnnnnnnnnnnnnnnnnnnnnnnnnnnnnnnnnnnnnnnnnnnnnnnnnnnnnnnnnnnnnnnnnaccgaatggcagagaagcacctgaaaaaaatgttcaacatccttaatcatcagggaaatgcaaatcaaaacaaccctgagattccacctcacaccagtcagaatggctaagatcaaaaattcaggtgacagcagatgctggcgtggatgtggagaaagaggaacactcctccattgttggtgggattgcaggcttgtacaaccactctggaaatcagtctggtggttcctcaggaaattggacatagtactaccggaggatcccgcaatacctctcctgggcatatatccagaagatgccccaactggtaagaaggacacatgctccactatgttcatagcagccttatttataatagccagaagctggaaagaacccagatgcccatcaacagaggaatggatacagaaaatgtggtacatctacacaatggagtactactcagctattaaaaagaatgaatttatgaaattcctagccaaatggatggacctggagggcatcatcctgagtgaggtaacacattcacaaaggaactcacacaatatgtactcactgataagtggatattagcccaaaacctaggatactcaagatataagatacaatttcctaaacacatgaaactcaagaaaaatgaagactgaagtgtggacactatgcccctccttagaagtgggaacaaaacacccttggaaggagttacagagacaaagtttggagctgagatgaaaggaaggtccatgtagagacttccatatccagggatccaccccataatcagcatccaaacgctgacaccattgcatacactagcaagattttattgaaaggacccagatgtagctgtctcttgtgagagtatgccggggcctagcaaacacagaagtggatgcccacagtcagctaatggatggatcacagggctcccaatggaggagctagagaaagtagccaaggagctaaagggatctgcaaccctataggtggaacaacattatgaactaaccagtaccccggagttcttgactctagctgcatatgtatcaaaagatggcctagtcggccatcactggatagagaggcccattggacacgcaaactgtatatgccccagtacaggggaacaccagggccaaaaagggggagtgggtgggtaggggattgggggtgggtgggtatgggggacttttggtatagcattggaaatgtaaatgagctaaatacctaataaaaaatggaaaagaaaaaaaaaaaagaaactctatatcccctccatgatctcaaaaagaacatctaagtaaaattttattgtattctacaagtgaaaattatgtatccaaggaaacaggtattatgcaatacccaccaagattatatatatatatatataatgttttctcttaaaagatattttttttagtggggaccacaaaacttagactgaaagaaaagtgtctctctggtaagccatataagaagatacaaccctctcaataacatttattctacacagcagggactttcagaaagaacaggaggagatgggggggggggagaaagtagaggaaaggagggggagggagagaaagaaaagagggagagggagaagtaaaagtgaaagaactcgggagtacaagtcttgatttgttagagaaaatggaatcaaattgtttttcataacaatcccctttggataacctgataacatacccagctagaataattcatatttacccagaaggaaaatttggaaagtctaaactacagttgtcaagtacatattgcttctgcctcagtctagtttcaaactagaaaatttgcaacaaatacctccaggagagcctctcatgctgagttactgcagtcttacctgtctgtcatgttgaagtcaaagacaacacttcagcaagtgacattttctaactcagctaactctctagattgtttttatcacaggagaagattcactttcccaattgtagaataataaatactccttaaaagagctcatattgcatatgcacaatgcacatgtgcacaaacacaggcatgcatgtgcacatgcacacatgcacacagacattcacattcatgcacatacatgcacccacatgcacacatacatatactcttaaacaactataactatactttacaaaatattattgggtatactcaaaatgatttttaaattttttgaaacgtgaaattttttccccttatactatggaaatcttaaataaaagcagttgatactgttttctgagaaaactgaaagtgcagtagagatctggggacaatcttttgatataacaatactcaccataggaatagttatatctatgccacttttaaaacttaggagatcaagttttatttatttgcttaccttagagagcctcccactaagaacagaacgttttaattctgagcaagaaacatcttgacatcttttcaagttatttgaacatggtattcataggtagagatttttgggatgtgttctccttagtgttgcccatttcatgcattttggaaggcatgctgctgttacttctaatgttccttctgttctccctcttttcttctgagtgttttcatgaaaagtgtgttgcatcttctgtaacacagttcttggctactctgttccattcctttcaacccctttgttttatttgcttatcttccaacttctcagttcttttccttggcagtatctagtctattttgtaatccatcaagtcattctttgttcctgttccagttactttccccctagaatttctatctttctcttacattgcccatccttttctcttcagtctatttgcatattgattagtcactaaatagttggtatgatgtttccaaaaactcttccatatttaatttggtttgtttctagcttgctatttggtttgctgataatcagagtcttgtgtaacccatgcaggcttgagaataaccatgaattcctgcttccatgtctcaagtattgggattacaagtatgcattcaacttgaatttggttttgacacaagcatttttccattagatttgtcttttgtcttttatgacacatcgtatagttattcacataggaatccagaaaaggtggttgcagtgaaagaaacaaagtcaaatagttaacagtatgaggtttctatgattccatggctagggagaaggtggtttgcttgttttgttttttgttacttttcctgctatagctgtgtccaaggctagaattttctgtagtgctttcattctttaggggttcctttgtagaatcttagatgtcagtcttttattcagaactctgttaacatatacgagtaggcaaaacttttgtgggtggtgtattgcattatcttataattcgggcttagtcattcagtgagtctgtgtatctgtgatatggcttttgtgtttctcagcctcttccccctctcctacagaggtgacaaactgcctatcctgagctggacttgggtatttcccatcccctgtgcggaaatagaagagttaattgggtatttctcccccccccccatgtagaacctaaagtagcatttgtttgagttggataattcctgtcttcccattgtttaggctttggtaaaaccccacatgtttgttaggctcttatcaaataatcgtccctacatttgttctttaaagcgatcagaggctctggcagctgctcttttcttcactttgcaaaatgcacaatggggtttttctctagtcttcatgtagataatctgctgtggtttctggaaagaaggcccaggaaagagtaggaggctctgcaaagtacagtctcacaggttagtttcctgttcacttatagattccaggaactaatcaatacccctaaaggttcttacccgtgtccaggcaccaatcgaggttcttcttgcagtgaactaaagctctgcatcaccttcattctggttggagctaaaacacatcaccatgctaccttcctgtgtgtttagacatatacaaaaatggttttgttcagtgttttttcttttccactgaagaataaaaacttgagcttaaaagagttcactttggcaatattagactcttatatccctattatgttatataaatgtgacaaatactcattctatagagcaggccattgaatgagagaaattttaacttgaagagatgtgtctcaaatgaagtctgcatatttagacagtataagtatttttacctaattaaattttaaatggtggtattacttaatgacaacttttagtgttgactcaaagggcattgggatgacagctgcttttctctcatttgattgatggagacatcattctagactggaatatattgatgagcaattgatgggcaaagcatcaaagatttcttatcttggtaaaaatgtttgaatttaaggaaaaatatagaaattttgcattatgaatgtgttgatatgttccaatttgagcaaataaataatagaaaatggtcataaagaacatatatgttctgtgaaattactgaaaacaaaggaaggcacagaaagtgcataaactaacaaggacacagggcattgagggttaagtttttaagcagaatatttagaatggattgtattgaggaggcaatatctgagcgtacttcaagagcaagaagggtaggccatgaaaatatgaaaataactagttacaggaccagaaaacaaaagaaatagggcatacaaaaaaaaaaaggattgacaacagaactgagagagagagagagagagagagagcatgcaatgggttagagcaagttgagttatcagaccagatcaaagtagtaccaaggagaaccaggtaaggacttgaatgtatttgatattgtagttctatgaagagatggtaggtataattgatgtagcactcagaaagagtctttggctactcttttgatgtttgaggttctggagactcactaggaagacttgcaacaaacctagtaagaaacaatgtggcatagacaagcattttattgactgggatgcagaacctcaagtagcagaaaaaagaggaaatctgaagatgtctctggtgttggtggaatgaagaaagataaaggagatggagaaagcatcagatactattctctttgtggggtagggcagactgcatcaagaatgttaatcttgagttacctgctatgtgtgtaaaaatagaggtattaaatagatatatagaatccaggcgcatcattttgctagagctgtaacagatagatgctatttaaaggcatgaatatgcgatgtgaaggttatacatagagaactgtaagtgaaggatagagaatggcagccaagacacttgaaaagacatgtgcgtgtaagcagcaggtggcatggaaagaaaagaaacaggaaaaaaaggaacacaaaatagagaaaaatagttcaaagtggaaggaatcaaatgtactttgtcaaatgctgttcgtatgttatgtaaaaaggagacagactattattacttcagaagagttaaaaatcaaagtgccaactctcagcaagtttttattatactcacagattagggtgtcttccagccctcattggagaagcttcttttggcaggagatagagactaacacagagaccattgactggtcagggtgtaaaggatagagtgctcagctctaagtgtgtcatttgtgtcataccccttccttctgggaagggatcatgctgaagagggtgcagaaagattggaagacctggaagtagtagatggctacactattgtgttctgtaaacatttggcagctataatatgaagtcatagaaattttgacaccatgtatatgacccgtgcaaactcaagccagcccaaatcacgacacagaggggaatgagggtcagggagtcccactcctggatgagaagctattagtagttgatagctgccaagaaagagaaattcagttttctttaagagttttggcttctcatagctgtaatataatctattgggtggccatatatatctaagaattactaacaggacttgaaggattttaagcaaatggggcatgtgtgaacatgatcaaaatatgaacattttgaatgaataaaaatatttaaaagaaataaaaatactgaaggtaagtcaggaaatttgaatacaggggttaggcatcttggcccaagttttcttcagaggccatgaaattctccaaaaataataaagttattttttgccaactgcacacactatcgagcaatgaaggtagagatatagctacattatggctctgctattctgatgggattatttagagatatttccaaaccccaaatgacatctagtgtaccaactcaaattgttcctgtatttaaagaatgtatgaaactaggatggccatctagatcttgtactagaactctaaaactgacttcttttattcagttaacaagattttagtttctaaaattgcctggggtttaagaagcctcatgacacatattcttaattaaaggaagaagctttatacaatgaactgaaaaataagagaatttggggagtattttttcttgaagctcctctttttattatttcttattttaaatgaacctacagatttatagaactccattgtagaagccacgatttattttattttattttcattttattcaaaataaaagaattttttcattttatgtcattagaaactctgtcatagggaatatatgtgatatgatacaaattatatatggtatattgtcagatgctgaataaatgaatattaatatttaaaaataataacataatattttagaagaaaatattttctaaacttttgtgtttttaattacatgggagagtgtcaagtgtggtgccacatgcctataacctcagtaagtaggaggaagtggcacaagggttgccatatggtgaggctattctgggatacacagtaaactccacgtcatcagccatggctacagagttaggcccttctcaaataatcaccaataagaaatcccatagctccacccaactgctgctgaccccaaaacaacagccaagcaactaactagtcaaccaaacaagaacatttacctccagtgactagagataatgggaaacaatatggatttatgaaaaatggttacaaaacttgtgttagaaagacatacaaaaatatatgctattataaatcatcttaattaaagaagatttgtaataatattttgagattactactcagagagaaagtgtatgagcacaatgttttaagtggctctgaagtctcaaggcttcctagagcacagatttgcttgcccccagtgacatagttgtgtggtgtgcactaaccattttacaatgtgtaccttttcactgtgagctatcctgtaacactatttctacttgggcaagatatagcactggtggaaaaaagtaaactttgacatttaaaaattgtctgtctctatgccatacttaaaatatcttacattttgtgtgtgtgtgtgtgtgtgtgtgtgtgtgtgtgtgtgtggaggtgggggggggtttggcacgttgttttgtcctctagtataagatttgcatgaaggttatgttagatactttaaacatgagtttctttatgaattgcaaagcttgcttaaataataattttacatataattcctggatctcagaaatgtgacttaaaatcaaatgataagactttcacacttatctatttatatgtacacttatatggatgcatgatgtatgtcataaaatatatgcatatatttaagaatgagcagcatttaagtcaggagagtgcttaccatttgtagtagtaagaaagaagtgatatttgctgagttttacataaatataagggttgggtaacctctgtttcttgagttgagcatgttggtatatatatcattttgttttcatcaaaaagtttcaaaactgaaaagtctaacataaggaaaattatattatgattatttgaattcttttctccctcctaaatgaaaattatctatggtattggaagattatctctacccagacaccatctcttgagagctctttaaacaaaatgtcagttgtcttctctttcattttcagttcaaaaggacatagtccggattctcccaagtttagacgttgaagtcaaagatattactgattcttatgatgctaactggtttcttcagttgctgtctacggacgacctttttgaaatgaccagcaaagagtttcctgtagtagctgaagttgtcgaaatatctcaagggaaccacctgccccaaagtattttgcagcgagagaaaaccattgtcatccacaaaaagtaccaggcttcgaggatcttagcttcagaaattcgcagcaatttccctaaaagacacttcttgatccctattagctacaaaggcaagttcaaaagaagaccacgggagttccccacggcctatgacctgcagatagctaagagcaggaaagaaactctccacgtggtggccaccaaagctttccatacacttcacaaggagctgtcccctgtgtctgttggagaccagtttctagtgcatcattcagagaccacagaagttgtctttgaggggacaagaaaagtaaacgttctgacctgtgaaaaagtcctcaataagacccgtgaagatgcacagcttcctctatacatggaaggaggttttgtagaggtgattcatgataagaaacagtatcagatttccgagctctgtacccagttttgctggcccttcaatgtgaaggtggctgtgagagatctctccattaaagatgacattttggcagctaccccaggacttcagttagaggaggacatcacagattcttatctacttatcagtgactttgcaaatcctgaggaatgttgggaaattcccatgagccgcttgaatatgactgttcgactagttaatggtagcagtttgcctgcagatgcagggctacttcaagtcaggagttttgtagaagagattacagaagaacagtattacatgatgaggaggtacgaaagttctctatcacatcccccacctcgccctcccaaacatccctcagctgaggaaatgaagctcaccttgctcagcttagcagaagagagaacaataaatctgcccaagtctctcaaggtaagacaacaattttacagattttcttcttcttgagatattaagttttgggttgtttctgaatgtgctttttttccttctgttcttcatacaagtttgaaccaaatctgtctaatacatgctgcatgaacaaatatcaacagagcagaagctgccctgttgcagcatttggtgctccaccagaatatatggcatgaaatctatgtagagttggaaatagaagggataccattttgatatgaccacagaaattgacattcaaaggggttttggtgattaaatatatttaataagatgcctctaaagaaaatcccttttattctggaaatatggctcatttttcttaggtagaattatcttaatacttcacccaggaaatgagcataacaataaactcccagcttcataggatggggggagcttactgctaacatgcatccctaacacatgtcttcattttgtttcatgtgcaagatgatgtaaatatatctggccagaactgtgtgagagaatgagagcatctacatacataatgctgcttagaattgtaatctttagcagttctattggaaagataaagtcaataagcatataggcactaggaggttttaacagatccaaactgctcaggacattggacagtaattcagcatcatttgtacttgatgttgttgattcttgagcatgtctgaaggatacctgagccaaacttgctccctcatccagtatgcacatttggggtgtgtgtgtgtgtgtgtgtgtgtgtgtgtgtgtgtgtgtgtgtgtgtgtgtgtgtgtatttctatgttgtgtggaaggagtgtgttcttttccagcagatgttatgctagaagcataaagaaaaccaagcagttagtaaaagagatactttctgattgctcctcacattcaggaaagatggcagtgctgggcaccaagactcatatatggatgtgggtctgcttgcaattgtacgtatcagagactgttttaattttgtgctaaaagttaaatccttaagggtttctaaaattgttttctgttaaaagaataaagctaccatatttatctctgaaaaaataatttctaaaaattactaaaaaaacagttccaaaataaaattgagcaggcaacatgaaggaattctttgatacttgcaattgacatattgttttcactgagttgcataatactaacactggtgattaggacatagacttagcgttcccaggttcttggcatcttattttaagaatgaagcaaagcaaagcaaagcaaagcaaagcaaagcaaaacaaaacaaaacaaaacaaaacctcacatatatttgcagaagtagcaaggaaacgttattctaagcaaagcatagagcagatctaaaccacactattaggagtgatagtgggccacatgagagaaaatattcaagggccccattattgtttaggttttcatttatgggatccaaaagtttctgacttgctatatgtgggaagacagacactcaattgatggaacgactccaccttactggtctaggcatttctgtcagccatgtctgtgattactacatggtttgggtgactgtccattctgattgacaagcttacataggctttggtcattgtgaatgtccctgtccagcatgcatctgattttaattatatataagcataagaagatgaatagggtattgctaacagattattaggtgcattgttcagaggtgtgtgtgtgtgtgtgtgtgtgtgtgtgtataggatatgtgagttaaaggtctcaggctgccaaacacctaatgtgtgtgaatgctggtttagaatccaaatgactcaaccattccctattcttgcctacttcaaagtgagaaatggatgttttcctacattttattaaagggtagaataatatcacccacccaaagatatataacttcccagaacctacagggataaaacatggcacgacaaaagaacatttcacctatgtttaaaatccaggaccttgaaatgagattatcctgaggtatccagataggtataatataatccctgaaggctttataaaacttttccatggaggccagcattacatggagaaatgattaaagagtgctaaagagactatgctcctgttttcaaacagagaggaggggaaaaagtggttgacggtactcctccaaagctatgaagcacagacaaacatagtcttccataggaggtccagaaagaatcaacctagctgataatacatcagtttgactctatcagttctcagttggatttctgacttgctgacctctaagattataatattatggtatttaaaagtctaagttgatagtataacattatatcaagaataaaaagataaatgtggccaggcaatggtggtgcactcctttaattccagctttgggaggcatcggcaggcagatttctgagttcgaggccagcctggtcttcagagtgagttccaggacaaccagggctacacagagaaaccctgtctcaaaaaacataaaaacaacaaacaaacaaacaaaaaataaatgtgacctgttagaacaattttaaaagtagaagtttcttgtttatcctgaatagcttccaaataaatgagacacagactataagatgtatttgataagatttatttgataagcttaatggcacgatatcttagtagttattgatctagtctaatcctcaaagttaatcagtctatttcccagcccaaatccctaagatactttcatattagtattcatctggctctctctgctccaggtctattcccatggtgtctcctctacactctcctcattgtgaatctcctcctcctcctctctctcccttccctggctgccagaagtccagcccttttctctattttactcagtattggctaatcagctttcacttacaaataagagaatacatttgaagcaatgtttacacaaacttgaagtgggatttttttataataagcattacaacacaaccacatttgggggcagagaaatcagcatttgaataacacaaggatcatctttgcatgtaggtgtaaaactatcatgcctataatgacccaaacttgagtagggatttatagaatgattaaatatctaagtctctgtatgtaggctaggatatactttttggaaagttacttgtttgtttgttacacagttatgctgtatgacccagactagcctcaagctcgtgttctttttgccttagcctccagaatagataatggatttgtatctttggataccaatgatacaaataacccacctttaacaacaatgatcaacctttccttttcctcctctctccttcctttcccccttactatgtctgtccatgcccctttccttctttccttccctcctttccttctttcttcctttcgccttcttaccctgtcattgttaggctaggttgttatgttgacctatctggaaagacagactcttagctgacagaatgacttcatctaagtggcttgtggatatgtttgtgggacatttccttaactgatatttgacacaggaaggccagcctactgtgcacagtactatgattttaggaaggtgctatgtaagaaaggtagctcaacagttgagggggatgaagtatgtgaacagcattccatctctcctttagatgaatcaaggaatcatgagccttgggctcatgccttgatttctcttgatgatggtggtctctaagctcaagccaattaataccccccccagttccagagtaacagagcaacaagctataaaaccttctctccttattttccctttcctttctaccctttaaagtgagttttatcagctcatgtgaccatggagaatctgaggaaacagttaagggaactgggatcttgacgataactatagtgggcattcatttttttctatattgggtttcctatctccagctagtttttttaaaacatgtcacaggacttcagagaattcttacatcataaatttcaatttcagtactagaaaagtatggtctatcattatttagactgaattcagaaagaaaaaatatgtaggttacactacatacctctgtcctgactttgtttgctggttgcttcaaccatagacaaagttgatgaatgaatgatttactcttaaacccatacactacataacttagaatgaacaaaaaaaatatcttcttagaattctattggctgggaaatgtaagctcaagttgctagtaggtttaatctccagttccaagatggagtcttgtgactgcatactccagaaaggaggaacaccacttcttcctattctagaaattcagaagagaggaaattcattcctcaagtctcttaaatagaaagttattaagtatatttttgcatggtcagatctatggcctaagccatttcaatccatcccatctccaaatactgttgcattggtgtgaaattgagaacataagcttcaaaagagacaaaaacattcaatcagtaatagttaagaatatcatgtctggacactgtaaaaactaaaggcaaaaaaaaaaataggtgatgtaaaataacagatgtttactactacccaaaaataaaagatgtaaaaattctaacccccccccaaaagaaataatagataaaagtagatttaaaagtttaaaagctcagaatacctaagatacaattgacagatcatgtgaagctcaagaagaagaaagaccaaagtgtgggtgcttcagtcctttttagaagggagaacaaaatactcatgggaggaaatacagagacaaagtatggagcagagactgaaggaaaggccatccagagacttgtccacctgggactccatcccatatacacacaccaaacccagacactattgtagatgccaagaagtgcttgctgacaggagactggaaggctctttcatagcctggcaaatataaaggtgcatccaaccattggactgagcatagggtctccaatggaggagttagagaaggagctgaaggggtttgtaacccataggaagaacaagaatatcaaccaaccataccctccattgctcccaggaattaaactaccaacccaagagtacacatggaggaacccttggctccagtcacatatgtagcagaggatgaccttgttggacatcaatgggaagagaggcccttggtcctgggaagggtccatgtcccagtgtaggggaatgccagggagtgggttggtgggtaggggagcactctcatagaagcagagggagggagtatgggatggggggtttctggaggggaaaccaggaaaggagataagatttgaaatatatataaataaaatatccaataaaaagtaaaaaacaaattaaaatgtatttttatagtcaaaaaaatttgaaaatactttctaaaggtagaatatgacttatgtgttttattaggagaaatatacataacaattttttatcttatgtactaaaaggactaaattaatatatgctgatttccagatctacgtagtaacttttttctgaccaggttccttgtgggtttgtggtactgagatctgagtctgannnnnnnnnnnnnnnnnnnnagggatcttccttgcgccggtgatggtaattttcgtcccaggttttctcttcccgggtttcggcaccaactcttatacgcgttctcacgaccggccaggaaagacacaacaaaccagaatcttctgcggcaaaactttattgcttacatcttcaggagcaggagcgcaaaaccccaagccccaaaaacgaaagcccccttctaaacgaaagcgaaaccccccgtccctatttaggagagttatccttcgcttaggacgcatcactccctgattggctgcagcccatggccgagctgacgtcacgggaaaggcagagtacaagtagtggtaaaatacccttggcacatgcgcagattatttgtttaccacttagaacacaggatgtcagcgccatcttgtgacggcgaatgtgggggcggctcccaacagtcacatatgtagcagaggatgaccttgttggacatcaatgggaagagaggcccttggtcctgggaagggtccatgtcccagtgtaggggaatgccagggagtgggttggtgggtaggggagcactctcatagaagcagagggagggagtatgggatggggggtttctggaggggaaaccaggaaaggagataagatttgaaatatatataaataaaatatccaataaaaagtaaaaaacaaattaaaatgtatttttatagtcaaaaaaatttgaaaatactttctaaaggtagaatatgacttatgtgttttattaggagaaatatacataacaattttttatcttatgtactaaaaggactaaattaatatatgctgatttccagatctacgtagtaacttttttctgaccaggttccttgtgggtttgtggtactgagatctgagtctgattctgaacaatgatgtcctggagtttgtgaagagttgtcaagatgttatgaaattctagaactatttttatttgaggaagctgtattgagtgacagcttaaatttgaaaaccttgacagtaggtgattttagttataggatatatttaaagaactcttcaaagtttggagggatgatatgcatctgtcatcatagcacctgggaggtagagacgtaagggtttgaagatctaggccatcctaagctgtacagggaaactctcaaaatcaaaacaagcaaagcaaagcaagagccatgttactgttgtgtggtgaggagaacagacccaatttttctaatatctccaactctggttgtagtagaagtatggggatatttgatggaatggtgttgtaacacactacaaatgacatgatagaagagaaaacagatggtgggtcgtgtcactagattcctgctttgataagtcaacagatcattgggaagaattcacaattgcttgctattgttccatcaattcttacatgtctaaaagaaaagccctgttcttttctctaaaattgccttaaaatatcactgacaccgccatttttctgtgctcagatctatgagccttctagtttttaatattccttacccatcatggagatgagaatttgcttagtaggtcatttatggaacacaacagaagatctgtcaatttctacataatgtacccagaaaaccagtattttcttattattcctaatatcacccttctgtatatttcctatgataactgaattcaagcttttcttgttctttttgaaataattagacgtaagggttttgttttgttttttaatgttttacattagggagcatcaatttaaaacaagcctctaagtcttgggattttacatggactattgcttaaaatttggagaacaatttgtgagggttacttagaattcaatattcagactcatttaactcattaaaatgcctgtttattttcatagaaaagagtactaaatgctccattatatgggttcactttcactttcctaatgggccattaactttactagatcatttcttgcattgttaaataatagggcagatgtatggacagcttaagagtaatactctaaaatgtactaagtattgcccaaatctatctgtggcaggtgccaccggtcagttaagaacactatgaattcatctaagatgtttgaaaattagtaatctatggggacaggtcacaagaactagatgcagttgagttcttttccatggcaggattaccaactgttttcttgggttgacagtatctcagcaataacaagagtcatgactggaaacctgaagacgacgaagcataaaatggggcacgagatccaaagacaggagaaatgcaccgaggcttaccacttcctcaatataacattaatagatggaagataatatacagaatctaaacataggtgggaagttgtagggattgttgatgacataatgtgaaaataaaatctttacattccatgcaactggagtttttgttagacagaaacaatgttataaagtggccgaataaacaaatccatgcctctaatgtgtcctgaagaggaatgatgtagggtagattcctgctcagaagttacgctttctgtgtcagaactcatttcagatagcttggaagaacatagactccatggagtttcaacggtcatggatatttatgactatagcttttgagtaccacacaggagaaatgtaacttctatatcctgaggaaagggcctataaccagagagaaaaataaacctttggttgaaagatgagatatttcacatcttcagagactatagctgggcccagaaaccttgcatttcatgaactctgtttggccattaaatgcccctgtgtctacttgtccctagaatttctagacttctgtggacaaaaacacgcagaggagacattaaggcaaagagcaagggaggcagtcatagcaaagttctgtgcaacaagcaaaacagaatagcctcagcagagtgatagctggcgctgcaggaggcagaagagccggggttttgcactgtgcagcacgagctgtccgcatgcgcagccagtgacacacttcttatgcatattaaataacctttagtagaattattatttatataaattaattcatgaacgcactagaagttgtatcatatatcatagttattattaaaaacctgtttcaggggctagagagatggtcacttgttaaaggtgcttggtacttttgtagaggaatgaagttttgttcccagcagccacactgggtagctcacaaccacctttaactccagctctaggggctcccaggtcttcttttaggaatctgcttggtacctgtacatatacacacatacatgcacatagacacatgcaatcaatatgtaaataaataagaaaatgaaaatttaaacaatcggcttaaatgtgcataaagatcacctgggacgcaaacatctctgttagggaattatgaggctaacatgacaccaggttatctgcagtgagtttgtgattccacttacaggatattttaaaggtcaagcaagtccccaggatgagaagagactttgtgctgccacagaattcataagtatgggggcatgcaatatgcagaactatgcttttcgggcccaacgctgagaagaactctcagggtaacttgactgctctcagatgcaggaactgggtactggtgcatggtataatagttactgcactgtctaaacaaaacgaaacaacaacaaaacaacaaccaacaaacaatcaccccccccccaaatctgccctatctatttatctttggaaatgtcagcacactctattaaccagtctaaagcaggtatcttaaaatggtcttttgctgtttcttctttgcttttataaactattacagcctgttgatcatatcccctttatgtctcttgaatactgctgggattttacacttcctcagcataggaccctattatttctggtttgtgtttattattattattattctttaatctttttatttttacagtccagttgttatcctcctccctgtccaccttctgacagttcctcatcccattcttcctcccctgtctccaagagaatgttcctcccctataccaaagttaaaacaagagtaggtaaactatctaaacaggctcatataccctaaggaattagaagatgtcactaaaaacctcccaaccaaaaaaaaaaaaaaaaagcccagggctaccagaccttccaagaagacctgataccaacactcctactaccccataaagtggaaaccaaaggaacactacccagttcattctatgaagccacatttactctgatacataaaccacacaaggacacagcaaaaaggagaactttggactaacttcacttgtggatagtgatgcaaaaatattaaataaaattcttgcaaactgaatccaagaacacatcaaaaccatcattcaccacaatcaagtaagctttatcccagggatgcaagattggttcaatatacaaaaatccactaacataatccactatataaacaaactaaaagaaaaaaatcacatgatcatctccttagatagtgaaaaagcatttgacaaaatacaacactccttcaagttaaaagccttggagaaatcaggatttcaaggcccatacctaaacataataaaagcaatatacagcaaaccaacagccaatatcaaattaaatggagagatacttgaagcaatcccactaaaatcagatataagacaaggctgcccactctctcagtatctattcaatatagtactggaagttctagctagaacaacaagacaacaaaagagatcaaggggatacaaactggtgtgtgtttttttagttcaacttgtaccaattctctttgtttctttttatgttatagacaaacttatcatcccccttactgatttctttatcagtttgagagaacacaccttccattgttccattgtgcctggcagctggctgtccttcagtattgtcaaaacagtcctgtgttcctgacttgaatatcttgtaccttgtttcccatttaagtatttggtagtttattatactgaaaatgttcagttctaagaactttgttcttttctgaatccctaatatatttccagtggaaatacctatctcaactaaattctgtttgttaaacatttattgtggccatattaaaattttgaaaattgttgtcttttcaatgtttttcttgatattactagtagcttcggttgatgtacaaggaaattgaggtgtataggataacatatatttacatatgcaactaaatgtagatactaaatgtagactatagtatgttcaaggaggacaagtaaaagttcgtattagaaccagtataagatataggcacatgtcatgaaagaggatgtatgttgtccttttagtttaaattctgacatgattttttttctggtggtggataagtgcatacaaatatatttgatactgaaagtggaaagcgtgaagctccacaggctcagaacacctgttttgtatggaagtgaaccgcgtatacaggctttggatctagctggctttaatgtttttattttcaactttaaaaataaagttttaatacattttttaaagtaccattgcttaaagagagatatcattaagcaattaagctagaatcatttgttttattttatgacgcaagtattttactacgtagtctagggtggccttggacccctccatcttcctgctactgtctcccaagagctgggatttaaaagcatgtgggggcacgcctggctgatgactgggcgtctcacattctggagcactcctctacccctgcacagttgagcttggtgctccagagatcacacaaattactattatagcttacgcactatcagatcttttacctcgctgtcttctcaactaaattctgtgctttagaagctgggaatataaatttatttctttaaaacttatccacgtatcacttgtcaatagactttatcaattctgtctactactacttttcaaaagagttttattttataaacaagcacatgcattgactcttgcttctgtgggtaaactcttttagaatcatgtaagtgtatatatttatgtatgcaatagacatattcagtgtaaatattgtgtatgtgtgtctatgttttatccattattaaattcccttgtcatttaactatgggattatttaaaatacatcaatactctttacaaaccgatgctttgaattttctcatgatttgttacattatattttaagtaaaaatcaattcccttattttataggggttattttattcattcgtctttggccatgttatggtttcatctcaggatcctacacatgctaggaaagccccctaaaactaagcaacttccatagactgaccttccttttgtgggaggcaaaattcaagggcaaacactcttgcctattctgaggacattcctagactgctatctctctgtctctctttctctagtccctactctcttccccctttgctctctctctctctcctttcctgcctatgctgggaaatcaaactcaagagcagacatatgaagagtaagcagtctaccattccgcccagcacctgtattttaaactaatgatttatcattatgtgtttatatgtaagcattcttgtgtatatcttttgtgtgatgccatgtcttatttattagataataaaaaaaagaacaagttaaaatcaggagaaactttatcaaattaattttgtttttatcagttttatatttccactattcatgtatctatggactcagggacatatatgtacatgattccatatcagctgttcctgcaataaagtgatctttggacacatgagtgtgtatacaggtatgtacaccagtatcatactgaaaatcccaaacctaagaaaaatacaagttcatgtagccccacttttaaaaatgagttgctgggctattgacctaggcaagacttaaaatatacagtcaattctagcgctacaccatgtttcccatcttggcacagaaccaaatgtctttaagtagtagggatactcttctcatctaagacctagtaagagaatggaggagaggttagcagagtgagagagaagatcattttgcagggctcactgactacagtttgaacgttttttatgctgggaattatgtgtaaaggaggttggctcttcgccttcactcctctgataccaaattatgctaacttcatatgatctatttggtgccttcacattggattatgggatttttgagggtagtaggaacttgtattttgcccatctgaagaggctgtgtcaggagcttccccctgcctggcaagaattaagctgagagaaaatgacccttctagcactgtcacaggatagggtaggttccctggagtgaagatgtgaacttgagagaaaaagagagaccttttttagcagtttcattttcaagagcagatgagctgagggtggcagccagaagtgttggccttaatcaggaggcctcacttctaaagtacagttgccaaataatgtggagaaatttcccatgaaagaaagagcatcgttgaatccttctgtggatatatacaacatacaatgatggcctgaggttatgtgctctttgtccttattttttcttttattaagctcttgagaagtcaaaaggaagatttagttaataaggaaatactaccaagaaactaagcatccttacgtttttgctgtagactagatggcacaaggaaggattctaacctttattgtactaaagtgaggtgaagtgaagtgtctggtatatgataaatgttgctgggagtgtgggtacacatgtctgtatgtacttatgagaatgccaagaagggtgtgaggtgttcccctctatcatgctctacactagtgttttgaggcagaatctctcacgaaccagagcttgctgttttagttgtctgtctggctagatagatctgcctggctctgagccccaatactggagttacagtctcgttaggaaatgttcatttatttacatggacactttgatgtcaaattcaggtctttattctttcaaagcaatggcatattgagcaatctctctaacctaacaagtgtcagttaaaaaaaatccctattgtttactaataaatccctaaagagatcttttaaggttataatatcagtaatttaaagtgttacacaaaagcaacaatcatgttgtttgtggataaactttatgtgttttctcagtgtgtccttttcttagcatgtgtatttgtgttgctgaagagccacataccttatatatatatctgtgtactcattcatgtgtgtttgaatgcacaatgccacaattcccattcatatttctgcatttcaaggtttttaaaacagctgatcaagaagatcagcccttagtttcaaataatttttggcaagcctaatgcttttccctgtaattcccaaaaatctatgtggaaacttaatgtttttccttgttagtattctttgatgccttactctttatttttcttgtttaattttcagtccacttaggatctttcagtatagaaatgacagctacaacaggttttcctgatcttaaacttcaaaagctatgaatgaatttgttcccatatttctaaaagaactacggagagtgcacacatgaataaacataagtgcttgcaagtctggtgacagctatggacaggaaatgagtgatttgcacctcaatggcgaatgtctgactttaaattctctcctgtttctgtgaatctaacaaaaatcaaaactattatactcagggttactccacattttttgattcaatttacctactttatactgtatcagtataagaaacttacaatgtaacagttctattgtgtcatatagctacatatacgtgtgtgtgtgtgtgtgtgtgtgtgtgtgtgtgtgtctgtgagagtgtgtacgtgtgtgtgcgcactcatgctatctttagtattcttttttttttttcagtaacaatgtagactctcaggtacctcattctgcttaaggaactttttaaaggaccttattaatttaaaacaaaacaaataccctgtgataatttgattaaaatggaactaaccatttggacaagttgaactttgaaattagattttgccatcttattaaatggtttgacagttattcacctgaatcttctcgttgaagaaatagaaatctttctagtaagttcaggaatatttcggacacttcttccaatttagtatggaagggatatgagctgaaatgaaataggggaagactgtggtgtgtgggtctgtcatagtggcttaacattacgagatgggaagtgaactgagggttgaatggaggagtattgtgaaccaacttgcttcgtataggtctcactctcttttgtgctgtgactagaccatggtggtaaagattaagggtagaaagaaaaatgtcaagcttggggacactgtggcatgggatgttgccagggtcatggagggtggtggcagtaaagggggtaaatgccacctaatcccgtgtctatttgagtaataagacaaaaatgcctctccctggctgtatttcctctcctacttataaagaatacttttaaagaatattcattccataacttgactgctgacctttaaaattttgcatattcccacctgagttcttttattaacagaactgtcttttcttagcctttaagtaaactcaagtctttgtagaaaattttgagcatttcatttgattttatataactatggtttaaaacaataaaattaagagaatgtggttttggccctgaatttgttactcatttacattgtgataatcatactatctttgcctatagatttatgtcccagtgaatgacccgaacctttcctttagctaaaacatgcacactgtatataagctgtatattaaaaagatgtaattaaaaatttttatttgagtaccttaaaatatcaacaggataggacaccttgttgttgctgaaaactacagtgaagaaacaagaagagtctctgtggtggtttgaatgtacttggctcaggaagggggactcttaagaggtatggccttgtttaagtcagtgtgaccttgttgaaggaagtgtgccactttggagatgggcaatgagaccctcattctagctgtctggaagccagtcttctcttagccaccttcatatgaagatgtggaactctcagttcttcctgcaccatgccatgttcctgctttgatgataatggattgaccctctgaacctgtaaaccagccccaattaaatgttatccttataaaagttgccttggtcatggattctgtccatagcagtaaaactctaaataagacagttcccaaactgccttcttgtatattgggtgacagtggtctttctggtagcattatactataaatttctctgtctttggtactcaaagtgtgacattgtgatgcttgatttaatggggcatgattttctatacagtgggagttggcttctgttttcatcttcctctacctactctgagagaacttgttcaggaactttgtctcccttcctgtcttcctgtctcatttgtttatctcagaagcccaattggcatattgacattattttaactctacatgccactctacatgcagctattcatttgacatgagcatctatctccttatgaggcactcttgttgatttttcctaagcttcctctcttaggctaacaatttggtacccatgttgactcaacagggagccattcctgatatgcagccatttcctcttgcctcctgagtcacacaatgcatcaatacattgattctgtgtggtggtaacgatccctcctttctgaaacaaactaaatttgcttgcaaataaacataacaatattgttttctccatgtgaagggtgttacatttatgactgtatttgtcatagagagttgagagttaagataccaagaggctgaacaatgaaaggtaggaatggcttgttcttgcaaatggaaagaaatctagcctcatttagctaaaaggacaaggcctttctaatcacacagttgacatcatgaccaggccagggggaaaatgtacctgctcttttataattgtctccactcacagaagtggatttctcattgtctgtgcagctacaggaaatattgttaataaaagcacatgccagtctgactgaagctgttctataaagctcggctggaccactctgtgaaactgttatttcctattctgaaaactaaatctcgaatcacggttaaaaggtaatcagtctttgacagagtggtcttgaggagaggaacagtaattgagagttgattggtgtcacaggcttttcagggaacaatttcaaagtggaacagtggaagagaagcaaacacacccaaatggacctttcctggaatttttttttaggacaccaggctacattgataaatatattgaatttttaaaaatgtgtctttcctgaacaatacagacaaaatactatgtttttagacttcactgctttgacccactgtgacaaatcttatgagacagtctacaggtcttatggccatcttttgtagctgagggatcttaccaaaaccttcaagatccactgtcagtggtagggctggcttagctttcctgtctctggcctgcagaactaagatacaggttggaaaaggtgttgtgtgagcatcattttcagtgaactctctcttctgttctttgcatagatgttgtgcttgcttctaccattggtaacaatattatcttcctctttgtataactagaaagaaaaaattctaaaaaatagtacatttatgtactatatgtgtgtattctaaaatatgtatgttgctcacttacacacacacacacacacacacacacacacacacacacacacacacacgtactcacacaactcaaagggaattaatatggcttcacagaatatataaactttatgagtttaatttacaaattttatgattcaaaatgaaattattttgtttagaaaaagtacagtaggcttagaaacgatagcatgtttagatacaagtattttcttttcacgcactataaattgtgagacattgttagaaagaaggcgttttatacttcctagcagatttatagctgtgcaggctaaagaggtcaaccaggactctgccacgagtggaggcagatgcttctcttgctgctctgtttttctctgagcatagtgagaagtctgcaaagtcctcacttcactgaagagaatttgaagggcagaatttgagtcaagtaatcaagggaattacaatttcattggaattttccagcaatgtattatttttgtgacaatttatttggcagtattattacccgtgtacttgtcctatctgaagatctgaaatattctgcacagccaaggctatgctctgaacatatgtagaactattctcaagagatgcttagtgtttgtctagtatagaataggagaaggaactttgataatgtaaaaaaatatctcaccgaaaacattttatggacaaaattcacatgattttggtgcaaagctaaacattccccaggcatccttctcttccgcacactcaccatacttggttggtttaaatacaaagagacagcaaaccaaaccaaaaagaaggacaacagtcactcctgctgttagataggtcacggagaggactctgattttctgtttctttctaagactaattttgaagccttttaaagctttagagcagataactgatatgggttctgttgaaagaattgccctgattctaagaaatctctaaaccattaacattagcaatgtccagggccatggggctttgtccctacagccttttctgctgttatatgccaatcagaaccttttgattctgaaacttacttgataatatttagactcctttaaagcaaatacaacttatttctctaatatttcattactttgggaagagacagaaattaataaggattaaataaaatagctttgactaagcagaacttataaattctaaacatgtattgtctgatcacactaaaaagagaatctccactgtgatcattaaatttttatatcttttaaagaaaatattcagggctaaattttttaaagggatttattttcaagtagagtgctactatctgaaaatctattttagtgccttgtatttaccagtaaattcttattcttaaaggtctgggtagttgagaataaggcaatgattatgactcccatagggattggaatttatattgggcatctaacttcctgatactcaataataaaaggcttctgaataagagttagagagataattcagtggtatagggagcttgctgctcttcctgaggatctaaattcaggatccagcaggtgatttacaactacctgcaactccagctccaggagattcattgcctctttctcgcttcttcagttgcagttgcaggtccaggtggaggtccaggtgcaggtccatgtgcaggtccaggtggaggtccaggtgcaggtccaggtgcaggttcaggtggaggtccaggtgcaggtccaggtggaggtccatgtgcaggtccaggtgcaggttcaggtggaggtccaggtgcaggtccaggtggaggtccatgtgctggtccaggtgcaggtccaggtgtaaatgcagttgtagttgtagttaaaagtgcaggtgcagatgcaagtgcatcacacacacacacacacacaataaaaattatataaaaaagaaaggaagactacaaagtaaatcagaaaatggcactagatatttaacctcaacccctgaatatgattgttaggaaatttatcactctttcacctaaatcacactctgacttcttgaagaaaggcgaccagtaaacaaggtcaaagggcgattgagtagcaaacatatgctgtatgacagaaatagtacaacccttcagcttccatgaagagtggtttcagggttccctgcacataccaaaatctgtacatgctcagccctctacccacaatagtgtagaatttatttagaagtcacacacatccacctatgtactttaaaacacctctagactgcttatattactgaaaacaatgaaaatattatatggaaagttacaatactgtatggctatgggaataatgaaattaaaataccctatatattaagtaaaatcttttattaaaaagttcactctgatcagttaaatccatggacagacccctggaggtagagggtttactgccccagagagatgtatggaactatggtccttgcagatgttgctcacatttcaagagtaaaggactgtttcttaaccggagaggaggattggccaatggacccccagaattctgaagattaacatttgtggagtctagggtctatcctctgtgcaggttaggctaacactaagtgtcttacttaggctacaatgctgaacactaattatttgccttttctattctggatattatgtctttatcaggatataagctaccttattagccttatctgtcatatctatctatgcatccatccttctatcatctatgtatctatctatcatttcaatcaattaataaactatttaactgtgaatcatctattgcctacctacccataagttaacattctattatttcccctttataaatgcttgctagagtgttttgggaaagatgattttgatacatttgagtctcccccccctccccttccctatttacctctccctttctctctttatgaagaatcacaatttttatttagtcatggtaattattaattttaggtaaaatatagtctctattcccctcaattttctgattaagtatagaaggataaaagtatgttttagagttgctgtgagaattaagcaatttcatttaggaaaagtgcttagaataacatgaggaatataataaattcctaccagtcatgagaccaggcaaacttattttaaatacttatgttaaaatagacaatggatgacagtgcactgaaaatcttctacacagcaaacaaagccaccaagtgaaagggcaccctatagaatggaagaaactatttacaaactctacatccaaaaggcactgttctccattttcaacagaaaggaactcttaacgagtcagtagcagcagcaattaaaatgaagattagactgtgtgaaggcaagatttggagacaaaaaaaaaaaaaggaacagcaggtatcctatgatctcatgtgtaaccagaacctaaaaaccatctcttaccgtttggtggtgaaggggttgctcttagagtctgaggacaatgagaaggattaggaaggttagcaatagttaacaaaggtgcagctatgcaaaaacaagtaattctggtgcgtttttgcacaataatatacttaggatgaagcaatgaactaactgtacattgttggggctaaaaaggaagaattttagaaggttttttcatagggaaatgagaaatatttgaagttaaaggtgtgtaatctaatttaaatatatacaatgtgtacatgtatcaatgtgacatatgtaactttgatggttttatgtactagttaaagataaagactaaaatgtattaatattcttatatgttaataagcatatcctttaatttttttataaattttggttttatattcataaaactgtgtgctgtgttttctggttgcttcatagagccttcacagcagttgataatgttgtttatattccattacactgaatattccctgaagcttcttgaagcaatgacagatggccaagcttttgaaggaatggtgatcctatttacttctcaaatatgtaggctgcaaagcacacactaaaggatatttcagcctgttgttacaaaaaaaaaacaaaaaaaaaataacattacactttctttcttttttttttaaattgggtatttatttcatttacatttccaatgctatccccaaaatcccccacacgctcccaacattacactttcaatgttgtgcacagaagtgtactttaaagatggacatcacaggttacaaataaaaaaagtgaagtgtctaatgggctacttacagctgtcaaagttgttgatattattgtggaatatttacattttattgtcaaagctgtttaagagaccccaccctcaccaagggcatttgggtattagaggataggactccttcagtgccttcaatactacatcaagcctgttgatggaactatagatttccatgaatgagcttagtatataattacaaaagactgttaagaatatgtagtaatacattatttatgagaaacagtcattaatcctctcctataaaaataactcattaaaggtatttttatgtttattctattctggttttgttagtgtttttaaggcactgatatttgaataagtaagagaagagtggccaacccttcagttgattatttgtaacttagcagagacattgtaatgatttggtgcctgaattcctttcatgtgataaatatcagaccaagtcatgtctgaaactaagccagtatgggattgcttatctgtaatcctagaattcaccaatctgaggttggagaattttgagtttggtgatagcctgtgctaactagtaagtttgcaagtttagagctatcacagggcctcagttaagtcttgactcaaaaagcaaataagaaatcaggggtagggagtgcaagggagggggaagcagatggggagagaatgtgagagagaccataaaaagttttcctttaggtgtacagatgtatagatcatgagannnnnnnnnnnnnnnnnnnncaaagctgtttaagagacccccacccctccaccaaggggcatttgggtattagaggaataggactccttccagtgccttcaatactacatcaagcctgttgatggaactatagatttcccatgaatgagcttagtatataattacaaaagactgttaagaatatgtagtaatacattatttatgagaaacagtcattaatcctctcctataaaaataactcattaaaggtatttttatgtttattctattctggttttgttagtgtttttaaggcactgatatttgaataagtaagagaagagtggccaacccttcagttgattatttgtaacttagcagagacattgtaatgatttggtgcctgaattcctttcatgtgataaatatcagaccaagtcatgtctgaaactaggccagtatgggattgcttatctgtaatcctagaattcaccaatctgaggttggagaattttgagtttggtgatagcctgtgctaactagtaagtttgcaagttcagagctatcacagggcctcagttaagtcttggctcaaaaagcaaataagaaatcaggggtagggagtgcaagggagggggaagcagatggggagagaatgtgagagagaccataaaaagttttcctttaggtgtacagatgtatagatcatgagaaataatttcttctttgataaccaaactttaatctaattgtttgtaaagtttcacatgtagtatagatattacagagatataaatagctaaactgataatagagtgactgactttctagtctgatggtttaaaagtctcacccctacctgggtaaagtaataacagtatcatatactatctgaaaacacaccagagcactggtgggatgctaatcacaatataagtgctggctctacctcagggaggggttttcctgtgtcatgacaatctctttttaagggccacttcatagatatttgcatagttaaccaaagatttgtacttcaaactaatagaaatgagtttcatattccttgtttagtctcttttagggcacataaaattccctaaggagtgcctgtgtttaaatgtgtgtgtgtgcgcgcgcgtgcgtgtgtgtgtgtgtgtgtgtgtgtgtgtgtgtgtgtggcaatgggctatgcacagacagtctggcctcaagtttagctgaggtagaaccccggtggtggtaatttccacctacatgggtcggaaggcgttccttctcttggacccctggctcctgtcgaagttactgtccccacagccccctcaagagaagcgtgtggctagtagtcacacagataatgtcccaggcttctgaccttcaggctagactcctctcagttatctagcaacagcaagataacacagcccactgtaagaggggctgcttggttcctccttgctctcttaagcttttacttttcttactctccttcttactctccccctcttattcgagcctttcttctctccctcctttttccccttctctcctcttggccatggccggtctctctctctctctttctaccttttctctttccccctgtctttctacaatgacgctctaaaaccatagactgtctctgtttatcaaggcccgcagtgcttggacgatgggataggctttctcctaatgagccgtgcctaatctcctgccagaaggctttcctgtgctccagccagaactctcaactgcgtgggaaccttctccccctgctctctcttcccctgtctctggagctgagagtgtcgccctgtatcccttactctgttctcagctcctctgccatatctagtgtgggatgctggagactgagaccctggtactgggggctgccccttgtccaccctctgccgagtggggtcagtggctttatacagccagatgaccacctgcggcttagtggaaagtgtatgtcagtcctcccgtgtccgcctgcccagagcacaggaactctggacagaaacgggctctctccctcccctatcccctacccccacatactcacagtcccacgtgtgtgtgtgtgtgtgtgtgtgtgtgtgtgtgtgtgtgtgtgtgtctgtgtgtgtgtgtgtatgtgtgtctgtttttgtgtgggtacatgtgtgttgtgtttactggcccgggggaagagaatgtagtatgttgattgacagtcagtactacacattctgtcctggagacagaacatgaactgagtagcaggatgtattctatatgagagcaaaatcattgcttcaagaaggaaaatgagctctggggagacacatttctagtaaagaatgttatcttcagggacatattattttttaccttaatcttatttcatgtggttgggtgctttgcgtgagcatatttgtatgatcctgatacactgagaggctagcagaggatgtcaaatgctaccccctcctccagtcatctgcaagagcagccagtgctcttaactgctgaaccatctctagtctccaggaaatattcttttataacaattccttatgaaattctttctttttgagaaggaaagctatacagagtagtatctttaagggcactaagtttgaaaagtggccaattctaaatgcctgtcatcaatggagcagctagaggccagagaggttgcaagattggtcctccctcaaacagctccacatgatttagcttccatttgaaaggctcaccctttttatagaaaggtgaattacaggcatttattcagaccattactacaccttactatactgcattagaaaacaccatttttcatatgagtccttcaatgcaggtgttttattcctaaaagtatggcatatatttttctctgatttaaattttatttgctaagtaaatgagcaaagcaaaatgaatgaagaggtgattgatgattgactccatgcaaccagaagccccaaagagtatgctaatctcattatcccaatagtgatttgaacaagctgcctatgtatctccattcggagaggcaatgcaagctttaaaaacagttcaaaactgttaaatcatcaagagctctgaggtaggaatgatgccacagggaatgtgtctgaagtaaacctctacttaaaggtgcagtttatcattctttaatgcagagagaaaaatcagtgtgagggaagggctttcaattccttctaacagatgataaagttgtgaggaagagcgattgagcacttagaggaatttgccgacccctgaaagtgctcagtaactatcattctgactattgactgatcacacagaggatggctgtattttgactttctgtagaaattttgtctcgtacagccatgtctgtttctcaggggagaggggattttgtcagtattctgtgtgtaactcctgcagatgtataacaggaagtggctcctaagttagataaatctacttctgtgcaagataataaaactgactccataaatagaaagttgggttcaagtaagtgaataggtgttatctcttttctcttctcttctcttctcttctnnnnnnnnnnnnnnnnnnnnnnnnnnnnnnnnnnnnnnnnnnnnnnnnnnnnnnnnnnnnnnnnnnnnnnnnnnnnnnnnnnnnnnnnnnnnnnnnnnnnnnnnnnnnnnnnnnnnnnnnnnnnnnnnnnnnnnnnnnnnnnnnnnnnnnnnnnnnnnnnnnnnnnnnnnnnnnnnnnnnnnnnnnnnnnnnnnnnnnnnnnnnnnnnnnnnnnnnnnnnnnnnnnnnnnnnnnnnnnnnnnnnnnnnnnnnnnnnnnnnnnnnnnnnnnnnnntccctccctccctccctcctccctccctctctttctctcttcattccttccttcttccttccttccttccttccttccttccttccttccttctttctttccttattatatccacatgtttatttcagcatttcctgtggatcccttttaacaatagttttagacctaattatcacaccttatacacacatgcattgttctgagtcaggggcatgaagttgtctcaagggagacatgtacattactctgtgtcaagggcatggagtggttatgaggagaaacaaggaacagagtttgagatcaaaactatgtgttcagcttagcttgtaaaaggtgattatatagagtatagtaaggtttattacatcaccattcttaaagtaagttacatttaaacaaactgagaacagagtatatagttttaaatgatctcaaagcagatgattatcttggatacaaggttgggtgatcactctatttgtaaaggcaaggaaggggcattctgggaaaatcattcaaataacacctaagtcatgaaatggccaataatcttttgacaatatcaaaagaactaattatgggtaataattagaaagtcatggataataattgggacagtgtgtgtcgattttatatcttatttatctgagaagctgaaaggttaacacattgctaatgggcagattcttactaatacaagcagggaacatcagcttaagcagccagacatcatgatctatagcagccaacaagggcaaggactttgcgacttcctttcaaagaaatttcatgaaggtctggacagaatgaagcttttactccttctgacatcatgccatatccatgctccctgggggatattacacttagtgccattagttttctacatttacacaggtactggagagtcttgtctgagacaccaccacatctactcaggtctagccattggacttcaggatgcaatacctaacctatattggaatctgttctttgcccctatgtgcagtctatctttgatgttgggaggcaagtatttaatgcttgacccatattggaaaatgttgatgattaggtgtctaagacagttttggagttgactaacttggtcatgatgtaggtaccatggctgttctccatagggtattatttctttatcctcccacccctttcacttcttccatttgaaagtaaagatttttccatctgaatggcttttaggactagactttaataaacacttcaaagtagtctggtcggatgaaatactgtcatacttcactttctaaaaataagatgcaaaactacacacaaagaaaatgaagcgttatgcactgttgacttccttttaatgaaagaaatggtttatagatgacaaaggggattactgtcatacatgtcttcagtattctggctgctctaagggactagtaaattaaaaaaaaaagttaaatgtgtgagaaacattccaagttcagctggtaactagattccttggaaagcatctctaatgccatttaatagaagtaagtaaacagttaccaactggccaaagtcaataaaaaaaaaaaaaaccaaatatatactcgttataggcaatcaactccttggttgatgacaagtccctgggaggtctggggcatctggttggctgatattgttgttcttcctatggagttgcaacaccccccccccaccttagttccttcagtcctttctctagctcctccattggggaccctgcattcagtccaatggttggctgagagcatccacctctgtatttgtaaggctctagcagggcctctcaggagacagtcacatcaagctcctttcagcgtgcacttcttggcatccacaatagtgtctgggtttggtaactgtatatgggatgaagccccaggtgggacagtctctgggtggcctttccttcagcctctgctctacactttcttagtaatagtgagcagatccgcattgctatgatcttagttccaccacgacccatttctggtgggaaatttcctgtggtaggaaaactagtcattcttttagagaaagctataaaatcccagctgccatggtcatttcatatgtaccttaaagtgaaaatgcactctttgataaatcatccccttcagaaaacccaagtgatgtttgcaataagacaaatacccactcatcttattgagcaaactagtctcaatttattaagggagcatcatgcatactgaaggagtcagagctcatagggcaatggtgatgagcccccatctcacttgatacacacagttattgctttccagtttctgttcatatgtgttcctgtgtgtgttcacctgtgttcatgtgtgtgagtgtgtttgtgagtacacacttgtgtggagaccaatgcttgacattggatgctttctactaacccccccccccccgcccccgccacactattctttgaggaagatctcttggagatcctgaactcactaatccttggctagactaattggtcaacaagctctgggaacctagctctctttcctgtcctgagtgccctgtatttttaaatggatgagaaggacccaaatacaatttaggtcctttactgacaaagacatctccccagcccctaaagtatttggtcatggtccaaaagaatgatcgaattagcatactatttttataatagcaacattgtttcaactttaagtgtaactatttgaataaaaatttaatatttcttagcttattctttcatgtgacaattttttgtttcttttgatattttgagaactaaaagtttgagttgaaaatatgctttattgttcatgtctcaggtattattatgaagaatgtttcctagatcaaaggtgctataatttcagttgaatcaatcaaccctttcacaggtaggcattacaaagtataaagtaactgaaaataaaaggaggaagagggcaaataagctaattgcagagataaaacaataactgaaattatttgctattaacaaaaggcaagaaataaggtacaaaacaaacagaacaatttttaaaatgttgtatatttaaactccatcacttcagttaatattaatgcatatgggtaggtacttcatctaaagcccaagacagactgagtaaaaaataacatttcatggacatttcctacagaaaatacatgggaaatataaaggtatagtttcaaattcaaataatggtaatggggagtggggggggggagtaaatgctgttaaaatactatcaaatactcttcaaaagaaagcttagaagccgttcatgacaaggaagattccacggaaatgaatatagctgcacatagaaaaagaaatcttatattgaggaaatgctcattctttgggctgataccgtggttttaatgcatatacacctaatagtttgaaacacaaaaataaaaacctgttagagaaaaatgggtaaattcacagttatagctggaaattggaacatgcctgtaattggtggaataaaaaaaagaagagtgtgatggtttgaattaaaatgcccccatgatgacttgaataaaaatgcccccataggttctctctctctctctccctctctgtctctctctctctccctccctgtctctctctcttcgtctgcctgtagattattatgcaatccccagctactgctccagcactatgaatgttcccaagctcttatcataacaatcaactaaaccttaaactgaagtaaacccccaattaaatgccttctttgtaagagctgtcttagaaatggtgtctcttcacagcaaatgagctgttacacacacacacacacacacacacacacacacacacacatacatacatacatacagagatacagagagagagagggggggaagaaatagcttatttaggaaaaaaattaaaagttgcattgattttactggaacccccattcaaaaccatgcttttttgtgattctttgaatattcattgagaattctaacttatatctacattaattatctatttttatgaaaattattccaatagatggaaagaaatatgttcattattccacatttcctgtgagttgggaatcagcaagcttgcgtgaatggcgtgactaaggatcttacgatactacaataagggttacagctaagattcccctcatcggaatctgtgtttctaaggtcatagtgtgccaagccaggacattggtgctgaaactcatggccacatccacaggcctctcacagaactgacaacctgttagcaactgtaaaggagatgaagtctataacccaatttcagcaaacctctcaagtctgcttaatgcctctattagactctagttcctgatatcaacctgctgtcaaagtcaggagagtgagtacatgtagcagtgatggctggggttatcatgtactaggctaaaacattaaagactgtttacagatatagacgataaatggataaaccacagatggtaacttcttttaatacaataggactaactagaaatcaataatttattgattcaaaaacattttgaaaattgcctgactatttggctcacaaggccaaattctaaacaattcatgtataaaagacagaaattataaaggaaatcaaaaaataatttgaatttttaaaaaacaaaaatcattataattttatagtacagctagtatgatgttttatatacattgataattttaatttctcttgacaagtctgtcttctgccttaaaagtgctgaagactagaaaagagtaaataaaaggaattaatcaataatgagagcagctgaaattaaaacggaatataaaacaaaattgtagccaagttttgaaaaaaacaaaagaatacaaaaaaaaaaaaccttaaaaggctaaattaatagaaaaagatacaggattgtgaaccagaagaactcagtgttgttatctgttatttgtctcccatctttatgtatttattatgattcagtaaaaattatgattatatatttattatgattcagttgattttctgatactagtaattgacaaattcatattaaatgcaaatggtaatattaagaaaaccttaaatagtaaaagcaattctgtaaacggaagcaatgtatagacaaaatatcattaccaataaacatatagtgatcaaacagtgtggcacggcataagaagtggagtaaggaagtgtcaggagacactgaaacaagtccacttgtacatgccaacaggctttcaacagagtctccatttgattcaatgggcaagtgcatcctctttcttaaacaacagttgtttggggctgtagaaacagttcaggatgcttactgcccttacggaggccccaaagtttgttcccagcacctacactgggcaactcatgagcacctgaaacttcagttccagggaataccatctgctgacctccaggcactggacatgtagcacacaccctccctctcccctccccccatacgcaaataaaaataaatgaaaataaaaagatagtctttgtttataaatcagattctatgggaaacagctcacccatagattgaaaaatactagtttacctggacttgatctaaatgaagagattacgatctcaggcatgatctgcatagagatggggtattgagagtttagggagattggtgagcatatttccaatgtgggaggaacagagatcatctctggctaaaggataacctgtggtttctagtctccaaaaactggaccccatcactgcctgatttctcggctctgtatagttgtctcctactgtgatttgggagtgaaatgtcccccctaggcacatatatatcaacacttggctcccagattctggtgccatttaggacagttgtagaccttgttggagaaagaggggttctaagggagagctttgaggttttatagctgggtcctacttcctgtggtccactctctgctttctaacggtgtatacaatgtaaccagtcagtctcctgctcctgccagggcactttccctgctattatgaaatgtatccccatgaactctaaaccagaataaactaccccttccttttattggctcttgccattttgtcatacaatgagaaaaaaatgactaatgcattttttaaaattgggtttgcacttttcatgtgatttttcaggcaaccgagctagggtgaaagcatctttcctccggtactcctaataagccataaaagttgggtagtttctcctttgttcttcactttccccatctgccatgtaaaagagtgagctatttgagggtcaactgtcagagcaccctatcagtgcttagctcttttcaccacattgtccggcagagaatgaaacagcatggatgaaatgtccaagtaaggtttccaggaactgggcgtggttccttcaaagttgtccaaaactgtgttcacagccactgactagatcttgggaagatttgttacactgcaacagataactgagctatttaagtcaccgactgtgtaagaacgcagaatgatgtagattttaaatgaataaatgtgataattatgtctcactctaaactttggtcctccttaaatatttttgtatatcaaataatgatatggcaactagatttaaagtcacacagagtcattgctgtattaattatgctttaggtttcctagcttctctaataatgtggtttttcataaagtgatactttaagccatttatagatcttggcaggcaaagagatagcagatgtcatgcctgtgatgaaaatacccataatatgcctgttgtcataagaggatatttaaaaaatcttaaagcggaagtttagaattgtagaagcttatcaggcatagaaatacagatatttttaaacaaatattttttaaagatctctgaatagttttaacagtgctcagattttaatggcaaaaattagatgatgaggttcaacatgctctaaaaacataaatctttcttttggaagagacaaggtttgaatttggcagtaatggtttatcaggaatatgtctggtgatcagaaacctaagacatgcctctaaaagctgtgtcagccagtcttagtaccagtcttgatgccatcacattggcttctgtgtgtgaaactgttatgaaaaaaacctacattctttgtcttattccccaaggaagtatagtccaggctcaagttcttattctcttacttcaaaattttcaaattatccctagctttttagttatattttagccatttgaatcatgcaaaaagttaatcaggggctttaaatacttagttggtgttaacatatctttatatacaaactgacattaaattatggaacttacccagctctatcacactgatttaacttaatttcattttttctaagtatagcttggctggtgaagccagggaggggctaacaggcttagagtgtgtgtacagtatttctagaatgaactgtgcacccccagctcttagtgacccatataaatgaagggatcagatctctactattcaggagaccttcttacagtttcagaattccttgagagtgggaacattttaataatttggacttgagagatagaatggctgtttgcaaggaagagccatgtgaatgaaagtctgttagcaagaatgctgggtacagagtagagaagcttcaaaatgacatcccaagtacacgtgagtgaatctggctgtacacaaactaagtgctagagccaaggatttccagaggctgacatcaggagcttcatcactaagcagtaaaacaaaagaaaaaaaaaaaaggatgtgtcctgagctgtaagaacatttcctcaaagagcctcagtatacagatgaaagtcatctttgtgaaatgggtccatgagtgtattcatttcccccttgtatgttgggaagaaaacctcaagcaatagaaaacttccagaagtgtgaataatcactaactatgtgaaacactgcttaatctaatggaaattcaagtctatgcaaaaattaaaatgagaaatttgaattcactggatacacaatgaaaataaaggtgaggctaagccccaagagagtaaggacacatattctcgaacaccctaaaggtgtgcatttgggcctggcaatcctactgaacaattatttgtattagagaaagcattatatacacattcataaaagatcatttttggataacttcaaattctgaacatgcgcaaccagtccagatgtctattgatggatgaaaaattagataaatcaaaggatggttccaaatatttaaatactaatgcaggtgggggtgtattttaaaatagtaaatattaaaataagataacttattaagtgaaaaaagcaaattgtaaagcaaaatatacattgtttttccatttgtaaagaaaaaatcacagtcaaaattatacgtttcagtttgatcatatacatctgtacatgatatcacatgaccaccatgtgtgtacacacacacacacactgagttatttgcagtaaccctgtggaaggaggagagagaatagaggtaaaggctgtgaatacatggattcttatttatttatttatttatttatttatttatttatttatttattataagtacactgtagcagtcatcagatactccagaagagggcatcagatttcattacagatggttgtaagccatccaccatgtggttgctgggatttgaactcaggacctttggaagaacagtcggcactcttaacagctgagccatcttaccagcccaaattcttttaattgcaaaaaaaaaagcaaaaaaagaatggaaaaaaaatccatagtgtgactttaaagaagtttgtttttgtctcaggtgaagcttaagaatattggaaacaattagtttcagagtttcagcatcttatgtgaggctagtgactgctatgaaatttaaaggtattttctaatgttcttcatttaatggagcagagaaaaaccttcttgcagctgtgcaataagcatgaccacagtagagggtaatgtctgagtagatggcctgtaggctggtgatggcctgtaggctggtgatggcctgtaggctggtgatggcctgtaggctggtgatggcctgtaggctggtgatggcctgtaggctggtgatggcctgtaggctggtgatggcctgtaggctggtgatggcctgtaggctggtgatggcctgtaggctggtgatggcctgtaggctggtgagcatgttgggcaccactgtgcctctccttcacttgtgcagctcgatattctctatgatgtttgtcagggaatacaaagaaggcattaaagtatagcatttcagacataactgaacaaaggacagacccttgttttggcattaatttttgtttattcataataaatacaactatgagagtttaaaacaacctccttctctgtttaatgtacagaaagcaaagggccactagctcaaaccatttggccaattctgtgggatccttaaaaatacatgttctatttacatatattttacatgttttgttccttactaaaatcttcatttgatgtattaccttaaaaaataaaatagctaccaaaagtagtagtataatttttactttctggttgaggtagagctcaaccagaagttagaaagcaacttggccacagatctttgcaaagcaaatgtgaattcacgttatttgctgacagtgcgtctgaaacccagaatatttacatttcaaaaagagcacagcctcattctatttcaaattggaagattccttagggttgatcacctgttaagcaaaaatgctgggcgatactccctgggagctaaggctcgggctgccaaaatggtaaacctcccagtagaaagcaataggaagaaaactttagcattctttatcaggtaatttcaggcacaatgagtaactggaacttctgtttgaaaacactttaatgtttttggacctgttaggttcctgatctgaataatcacacaaatatataagaaattcagctaattgtgtctttttaaaaaaaaattaacttgaattttaaaatctaattaatactctttgatggcttcattctcattctgcctttgttttttcataaaagaaaatctcctagttttttcaggaagaaaatacatattcgaaaaggaggcattgattagtatctcaagcctattgttttctttgcaaaatatgattctctttatgtaagccaaaaggccctttagactaccagactggtgatgaagcaaaaatatttgcactttgaagtcaggggaaacagcttgctgggttgacagaggcaagggggagggaggtgtacctggagtctctaacaaatcaggaaacacagcaagacatttaagtaaattagatgggatgggagatgaagccctagaatacaaatagttagttaacatttgtttcactctgaaaataaactttttccattgaatgaaaaaaaaaagtgtaatcggtgtagatggtaacatcattaaataactactccgtggggcaaaatgacatgtgactttgtctctatgtgttgtttgctagacacgggttctaagaatgggaaatatattcatgaacatttggggaaaactctttttggcagtttggataggtttggcccacatagtttcatgtgtttgactatgtggcccacaggaagtgacactaatagatgtggctttgctggagggaatgtgtcactgtgcagctccagctctgcccagtgtatcgaatcagtctcctgtggatcaagacgttgaactctcagctcctctagcaccaagactgcctacacaatgccattcttcccacatgctgataatgcactaacccactgaaatggtaaacctgccccagctaggtttcctttataaaagttgccttgtttaatggtatcgtttcacagcaataaaaaaccctaaataaaacagtctgtcttaaattatcttagttatgttgtgattgcagtgacaaaaagctttggccaagacaactcatagaagaaaccatttaattggattgatagcttcagaaggttaaaagccatgatggtggaacaaagccatggtagcagcaacagctgagagcccattgtattgttcttcaaacaggaggcagaaagagacacagaaggaatgacaggggtcttttgaaacaacaaattccacacccagttacacacctcctccaataagtccacacccttgatttattctcaaacagttggaatgactgggggccaaatacactgagccaatgggacattctcattcaaacttccacatcagccatcagcaagttccagttattgtactggacctgttgaatatattttatacacttacttacctgaaaagaggaaataaattgcttagaatttgagataaaatagaaaagatatatactctacgttcaataacaagctatttttagcagattattaaaatgaatgttttaaaacaaagattttgttacttaataatgcatgattcatcttgtatctatagaacactcttagttactatatgaaacaaacaagtaaaaagatacatgaagtgcataaaattgccgtgaaaatttcttgtgggcattataagtaataagcagatattaaaaaagataatgatgaaatataatgaacctattgaataactgaaaatgtgttgtaattcccatttcaagatgtcatagaaaaagaatttttagttgattttatgtctgtcctaagaatgggaaatatatttatgaacatttgggaaaactccttatcgtggttttggataggtttggcccacatagactcatgtgcttgaatacttagtccacagggaatggcacttaatttattggttatcaggcctgaggatctgactttggaaagctttattttaaatatatgtgcctctgcactgcctttagccaactgatacagcttaactctggattgggcagctatgagcatttattttaaaacattggtaggtttctctgcaattgcatttggattgataacacagcattcaaatacacatgatgcttttccattccctttgcataacttgagaagtactgccttacatttggaagtacagaattacaaatttctcttcattgtttagaaattattttcaagttaaataacatgcaatcacttgtcacaattgtgggcaaacctcaaaactggtctatgaaatcagcaactctattcgttttcatacttgacaacccagcccaatttgaacctttattacgttctcgttctttcctttaaaaagaaaaactcatggcatgattaaaactttgttgtataataaggaggtataagtaagttggaattcctatgcctaacatagctttatatgtgaatttagtcttgagtctgtacaaatgcagagagactgaagaccacttacagttttttttttttttcatttaccttactggatttttgaggaaaagaactgttatataagttataacaatatttttgactttaagagtttgtcttagtcagggtttctattcctgcataaacatcatgaccaagaaacaagttggggaggaaagggtatattcagcttacatttccatgttgctgtgtatcaccaaaggaactcaagcaggtcaggaaggaggaggtgatgcagaggccatggaggcttgttacttactggcttgcttcccttggcttgctcagcttgctttcttatagaactcaagactaccagctgggttccacctacaagtggccctccgcccttgatcactaatgcagaaaatgccccacagctcaatctcatggaggcatttccccaactgaagcttctttctctgtgataactccagcctgtgtcaagttgacactcaaaaccagccagtagagaggtcttgaatgcctcagtaggtgtcctgttagtatacaagagccatcctgcacctgaattagatttatggggttcttggagttgacacaaagctttgcaattcacagtaaaagacattgctgtggtggcctttacaaatgcagacatgaggtaagaatgaaatgaattataaaggcttgctatagttggaggtggttctaatttaatattaaatgtttaagaaaatacatatgctaaaaaagctaataggaagttggagggccattgggaagacactgggagacaaactcattactaatgagcagtagtgtcttggttgccaccagcatttggtacctctatgtagggactaccttagaagaatggcattaccaagtgtgtattttagggagtatttgcaacagatagtggacagcagctaatgtctgggaatgtatgacctactcacactatctttaggtggtggctacttgggaggcagttaagaagtgtatcttttcagtccaatcatatcaggcacaagactgctgaatacataccttcacaaccacttttccatatcagtggtttttaccccaaattaagggaagctaggacgtttgcatcctccaataaaatggaaaggaaaaagaagttaagtattggttagtgtctatggcaaaatatataggaattgaatttggtcctgatttatcccttatttctttattttttaatgtttagatcataaccatattcctttgattattattaaggttttcaccaatgctttttactaatggaacatgttatcttatttaattcagctattggcatgccttgagccacacacactcctttcttttgacattgaagagagccccctctgtatatggctacacagtcatcattggtacaaacactgaactgtccccacatcttcttcctaggattcaactccttgtcagattaaccagggatcgtactagagatagtccttctccaggaattaagagaagccaaatttccccttctttttggagaacccaaccagtactcttggctgagacagtattcctgtattttggtgaaatcatctggcaattctatgttctagaggatacctcattgcaccatcaaccatcctttgggatagtttttaaatatctgtttctcctacatactaagaattggcatcaggtttttctttggcaggcatttgaagaaccacagggaaacatctattgacttagagtcaccggttgctacaaattattcctggatttttgtttgtttgtttgcttgcttgcctgtttgtttttcttcttcctcttatccatttcttctttctacaagaatatttatttttatcttatgagtatgggtgttttgtctgcatgaatgtatacacatattgtgtctatgactaagagtccagaagagggtgtcagattcctggaactgcaatttcagatggttttgagttgcgggcactctctttacaatgttttcccttgccttctttacagtgttcttctccttcttctttaatgttcccttctgtaccaggagagggcattgctactgctgtgggctgcatcaaccttttcagtacttgaacattagagtaccaatgggaatgatccctgtttcactcgattttgaatttctgcctaagttagctcttgttttagtcctccagactcttcctctggtttagcatttttttcttttgaagcttcttacttctctcaaagttgtctacaaaattgctttttccatcagaagaacaaattgctactgtaagtcagccccaattaaatgttgttctttataagagttgtcttggtcatggtatctcttcacagccacaaaactctaaaacatcatcattggtatcatttgtgccaagcaaacaaacacaaaacaaaaacacatcagaaaaacagatcagtgttagagaagtcccacccagagttaggctgtcctgaaatttcatgtgtagaccaggctggccttgtgggctatcattgcccaactccttgtttttctaaactagtgaagccttccttatttctgtctaattaaaccagtttcttgggggtgtataggaatttgtgtaactgtgtcccttttcagaactttctagtagtaaaatgtgagaatttatgttcttttaaaagttttagagcttctctgcatattataaacacttctcagtttagaaaagtcatgtgtcaagccttcagtggtcacttgtgaccaatggttacacataagacagaacagatctctgggaacaaagaattaactaagagcaaagaaaggaggttctttttgaagacctaattacaaacatttgcaagcagaacttgatggttctcatttgtcctgcgtgaggcagatggtaggaaacctaggacaagtacttgttgctgcttgaaattgcttttaacaataatttagtttattatgcaaaaacccagtattgcccaggagcaggtgtctgaaggaaacaccacatctttttggggaattaaaatataactttttaaaaggaggatgttagttaactcagtcaaagatagaaacaatagatctcttattttttaatgagctaaccatgaaatttacatgaaagaacttggtaagctggaaagtactatataattcatattaaaatttagaaatatttttgtcacaacatttcactgatgaccacacttcccttgatgctcttcagtgccacccctccatcccttcctaagaaaacttccctttgaaagaagaaaaattttttctttctcaaaccattttaaatctatgcaaaaatatatgcttttattagaacatcatagaaaatgttactggaaaattctgttatagaatgaaagaattttcttttgacttgaaatatacatattttgtttccccacttttcttttttaaagataattcttttttatcatggtgctaggctttcattacttctgccacagaataatgacaaactgacagaaatgttctaatgggaaaatgtctgtgaaaacttgtgacatattacaggcttatctccccccccccccaaataatttaagattaattgtggtagtcttttttatcatgatataaatacttggattgcagaacagtacatttcaaagttcaatgtgatattattgttcctttgtaaaacctaagtgaaaagatgctctcatatatcttgctttagaaataaatttgactagcatattaaagtgatatgcaaaaccctatcattctactttttccacctttagctaaataaagcaactgtcattttagtaaataattaattaacaaaagtcatgagaccatgtgattgattgacagcagatttgaaaggaaaacatcacaacttcctctaaaagtgctaaaaaaattttctgaactgttttgtacactgatctttctggcctctttatttttattatcatcttgtcaaacttggccattagaggctctgacagacagccatcttgagtaaagttgaagttggtcacggggacattgtgctgacgatgcttttatgctggtgcaaaagcagagttgatgaaaaataaccccatggtataatttagagttctagtggaatttgtcaacaatttaagaattgcctttctggcattgatcttcgagttaacaaactgtttctgtgctactgtttttaagagacagcagctttgtttgctcttactgcacagccatacaatggagcacttgttggcatactaatactttcacgtgtcaacttttagacagttaagttgcataatcttgggatgaaattcataaactttagatactgatgtttttagtttttaaaatgagatcatgacaaagacagacatgctaatttatctgtcaacttgatacaacctaggaccacctaggaagtcttaagacagatcagcatggagagtgggcgtgtctgacggagcttgtttggattatgaattgatgtagaaagattaaggtcattgtaagtagcagcctctgcaaaggaggtcttggacagcatataagagaaagctgaaaaaaaacaaaaaaaagcaagcaagaagccacattatgttctttttttctgcccttttcttcccacatcaatagtttgtaacctgaaaactgtgagccaaggtgagccctttctcccttaaagtgcattttgttaaagtatttctcccaacaacaaaagttaaactgagaagccaccagctttctttgtgcctctcctttcctttccttccctttcttttcctaggggatcttttggtggctgattatacaccacgaatcctttcctgtacttaggttactgttgaccaactattactcgattataatgtggggaaagagtatcagtgttttccaatgtcatcttatgggacacatttttgtatcacaagaaagctatagttaagctggtagtgagatttaaaacatctggaaagatggtatcccatatgccagatgttttttttcaacatactatggaacttcagaaaacactatggatgatattgtgaaatgctacacactttattagaaatgtcacaactcttgcactttgaccagttattcctccggagcaacccaaggtatgcttaggccaagaaaccaagctaatcagcccggtattcaaaaaattaaaaattttagaattatagtgattattgttattattttgaatgtgttggaggacacacttgtgtcatcccgtgttttttggagtcagaggacaactttcaggagttgagtctttcctctcactgtgggtttcaggacagaagacaggtcgtcaggcttacaaaacaactgtttttacccactgtattagtcagggttttctagagtaacagaactcatgggtagtctctatagagtaaaagaatttgttgatgacttacagtctgcagtcaaattcccaacaatggtcaacagcagctgtgaatggaagtccaacgatctagcagttgctcagtcccacacggcaagcaggtgaaggagagagaaaggtagacttccttcttccaatgtccttatgtaggtctccaacagaaggtgtagcccagattaaaggtgtgtgccaccacacctttaatcccagttgaccttgaactcagagatctccctgtcttaatcttttggaattcatagccactatgcctcaagatctccataccaagatcaaggtcagaaacttctatctcccagcctccagattaggatcactggtgagccctccaattctggattgtagttcattccagatatagtcaagttgacaaccaggaatagcccctacgcccactgagcctcctcactggcttaataaaaatctttaatgaatagaattggagacttttatagatagtgcctatcattatcacttcaagcttttgccatctaccaaatgatataccagcttgatgttggtttgtgagctttttatacagacttggctagtattttgctgagaacatctgaatctactcccaggaaaggaaaacaccttgtagttttcttttatcgtagtattctcactgggctatggtatcaggaaactctggcttcgtaaaatacgtttgtaattgttccttccttttgaatattttggaagtgtctgaggaatgttcagcattattcttctttaaataggtgatagaatttaccagtgaaagtcctggacttctcttcagtgagaagtgtttaaagtttgatgaggattaatcactggccagctcagccttcctattttctcatgataagttgaatgtttctaatactgcaccaattccttcagctttttccagttgttggtgaataattttcaaggcatttcatcatgatgctttgtgtttctgagttatatattgtgatgtcctttcttttatttatcatattatttgggtcctcctttctttttttaaaatctagctgaaatttgttagttttgtctttatatacagcttacagtttaatcgatttgtcctgttgcttctctcatcttgatttcagttgtttctattctaaccaggtttctctttcctaactttgtgttcagttgattttactggtttcttgaggtgtaaaggaagggtgtatgggtgacatgtctttctttcttcatcatctttttttgtgtgtgaccggccttgttatgctgctcagacagctctgaaactaattgtgtagattcttccagtcatagttcttctgccttgacttctaagtgctgggctaacaggcattggctactacatctcccgtgttttcccttccttccttccttccttccttccttccttccttccttccttccttccttccttccttccttccttccttccttccctccctccttccctcctttctctcttccttctttctttctttctttctttctttctttctttctttctttctttctttctttcttttttcttaaactctttattgattctttgtgaatctcacttcatgcacccaattccacatagaaaacatcttgtggaaactgtagctttggacctgcaggaccagctctttcacatactccagcagttcatagaaaactaatgttggagtgggccaactcaaagccctgaatctgggccacgatagttagctgagttagtcataccttcgactctcccagaccagcactaccagtgcaagctctctagcactgccctgtctggctcacccaaatgctgatacctgcaaggggcagagttgcctctcctgctctcatacccttgggggctgactcacctgcacctactccaacaaagacagcctacttgtccccacagtcaccattagggaagacattcatgggtataaaattccatcttaaaactaactttgtgtcaattcataaattgtgatgaacttcattttaatctttttaggagtggtgtgtgtgtatgtgtgtgtgtgtgtgtgtgtgtgtgtgtgtgtgttatatccaaggctttatctgctgttaggcaagttctgtacctctgagcttcttctataaccttcaaactccttatatgttttacaggagtttggtggcctactataatctattctggagaacatttgcttgagatgaatatgcattatgaagtcttataagatactgtaacattcatgtctgttaggttcacctgggttatatgatttccaaattgaatctatgtatggatcaacaatccatgctggtcacatagtactgaatatgccttctgctactgattgtattaatctgctaagttttgttaacatttgttttatatatatgagggcttctgtgtgtgtgtgtgtgtgtgtttgtatgtgtatttgtgtgtgtgcacaattattataactatttgatgaaggatgcaatgaccttgtttccctcctgtaacaaatttaaagttatttttaaaaatataagcactaccatctaccctctctttagttagtctgtatagactttttaaaaacaatcatatctaaactttcagcatatatttttcttggaaattgaagtcaactgtctttgtttttttctccctgtcttcccttgtgactagataattttcatagtgatatgctttgattcattttttctctaccttctataggcatgttctttgtgtttatcaagccttacataaaatattcataattgtaatggagtattttaaactgacaacaagtaagtcgaatcacataaaatgacacaagaattctacacttctgctgtttctgagaagcacatcttgtcgttgatttacaacttttcatgatactcattcacaaattattgtacctctgctttttataaaatcttttgtaacttagcgtttggatgacaattaaaaatttttgtacaccttcttgatggtaggagagtattccttatttgtatttggagtttttaattagatttttttcagtttaattttctttcttataaggtaggtataaaaatgatgaattctctctgcttttgcttgtctggaagattgttttctttatttatatttttgagacaaagcattttctggtggaaatactcatagtgggcaggttttttgttctcatttgtttgtttgcttgtttgagcacttctaatatacacagtcctctaacctggaaggttttggataataactctactaatttttttcaagaaggctcttttatatatggtgagctattttccttttgtaagcagcttcttcattgtattttaacttacttataaagtttaatgaacaacaaaatatgttttggtaattatccagtcaaccttagaatgaatagcatttccctgttttgttttttgttttttgtttttttttgtttttttgtttttgtttttttcagttacaagacccacagaagactgtgttttatgcattggttaaagaatgcagagacatatatttatttattatttattaatttctgtatgcagatggcttgtcagcacatatgtctgtatctcatatgtgcctttggcgtccatagagggagctggatctctcaaactggaactacagacagttgtgatgcaccttgcaggtgctgggcaatagagttgagtcctctgaaagagcagccggtcctgcttacggcttggctttctctccagacaatacatttaataggagcatagttattatttgatggtatattgacatcctgactgagacatcatgataaatgaatgaataatgaagtgtatgcctataattaatgaattatcttgtgctttctttcttggatcaactgtagaatatatgttatcaagtatatataaaactaaacaaagtcagtgcttaaggtgagatgtagaaggatgtttcataagccaaggcttgatctaaaatatgatgcctgacttaatgtaattaatcgattgttaatcccttgtttttcctacttgaaggaattttttaaattttttatttaatcttttttcttttttgttttacactacagattttattcacctcctggtccaccttccagctcttctacataccatatctcctccctgcctatctccatgagaatgtccccatccccactctacccctaccctacccctgccccactagaccactaaacaccctagggcctctagtcccttgagggttaggtgcatcttctctgacgtacccagacccagcagtcctctgctatatatgtgttggggacctcatatcagctatgtggtggtccagagatctcagggggtgcagattaattaagattgttggccttcctacagggttgccctcctcctcagtttcttccagtgtttccctaattcaacaacaggggtcagcagcttctgtccactgcttgggttcaattatctacatctgactctttcagctgattgttgagtctttcaagggggcagtcaagataggtccttttttgtgagcactccatagcctaggtaatagtatcaggctttggagcctcctctgatggatcccactttgggcctgtccctggaccttattttcctcagactccttcccatttccatcccttcaattctttcagacagaaacaatgacgggtcagagttttgactgggatggcaacccaatccctcacttgatgccctgtctttctgatggaggtgggctctacaagttccctttccccaatgtagagtatttcatctaaggtccctccctgtgagtcctgagagtctctcacctcccccaacctcctacctccggagcttgcctgttcccattctttctgctggccctcagggcttcagtccttttctcccacccaataccagaccttgctcccctcttcccctccccgtttccttttcttcccaggccctgccctccctctccccttgtttttgctctcttcagggagaagtggaactgaggcttcctcacttaggctcttcagcttgttgaccttttttaattctgtagactgtatcttgggtattctctactttcttttttctttctttcttttttttttttttttggctaatatccacttattagtgaatacataccatgcatgtccttttgggtctgaattaccccactcaggatgatatttcctagttccatccatttgcctgcaaaaatcagggtgttctcattcttaatagctgaatagaattccattgtgtaaatgaatcacattttctgtattcattcttctgttgtggggtatctgggttgtttccatctactgcctattacaaacaagcctgctatgaacatagtggaacacatgctcctgtggcatggtggggcatcttttgggtttattccttagagtggtatagctggatcctctggtaaaattatttccaattttctgagaaacagccagattgatttccagagtggttgtgccattttgcaatcccaccagcaatggaggagtgttcctctttctccacaccctctccaacatgtgctttcacgtgaggttttgatcttagccactctggttggtgtaaggtggtattcagggtcgttttgatttgcatttctctgataactaaggactttgaaattttctttaggtgcttcttaaccattcgagattcctctgctgtgaattcttggtttagttctacccccccccctttagattggattgtttggtttttcggtggttagcctcttgagttctttatatatatattttggatcttaaccctttattggatgtgaagttagtgaagatttttttccccaatctgtaggttgcagatttgtcttattgactatgtcctttgctttacagaaactttctagtttcatgaggtcccatttatcaattctgtttaggacatttccccctgtgcaaataagttcaaggatcattcccactttctcttctattagattcagtgtatctggtgtgtattgttgaggtccttgatctgcttggacttgtgttttgttcaaggtgacaaaaatatgggtctattttcatttttctacatccaggcagccagtagatcagcatcatttattgaagatgctttatttcttccactgtatatttttggcttcttagtcaatgatcaagtgtctgtaaatatatggttttatttctgggtcctcaattctattccattgattaacatgcctgtctctgtaccaatatcatgcagtttttattaatattgctctgtagtatatatagtttgaggtcagggatggagattcctccagccactcttttattgttaagaattgtttttgctattctgggtttttgcctttcccaataaatttgagaattgttctttccatgtgtttgaagattgtgttgggattttgatagggattacattgaatctttagattgcctttggtagggtggccatttttactatgttaattctgccaatccataagcatgggaagatctctccattttctgaggtcttctttgatttctttcttgaggtacttgaagttattgtcatacagatctttcacttgtttggttagagttaccccaaaatattttatattatttgtggctattgtgaaagtagttgtttccctaatttcttcctcagtctgtttatcatttgtctaaaggaaggctactgatttatttgagttaattttatatctggccactatgctgaagtagtttatcatctgtagaaagttctctggtagaatttttggggtcacttaagtatactatcatatcatctgcaaatagtgatacctctatttcttctttgccagtttgtaggctcttgatctctttttgttctcattgttctagctagcacttggagtactatattggatagatatggggagagtaggaatttcttttaaaagacaccagcaattttcttgctcctttgaatatagcttgaatatacaagcctagtccagttagttcactgagacctggagggtgtggtaagaattacataatatcaatagttataattagactatcatcatttacttgtcagaacaatagcaacttccaggaattctcaggggtaagcactatattcattaaagaaaattggaacgatgggtcagtttggaagtgtgctaagtttgaacccctagaactcacaaacaaagcatggttgcatgtgcctgtaaccccaggattagagattggagagagtagagcatcactcactgctcacctatccttaccaaacatcaagcccccagttcaatgagatacccacttcattgcagcacagtatggcagaaggcattagaggaagacaatcaatagcctgatctcatcgtctagagggactgcacagctctgcgtactctcataaccctgtgcacgcaacctgaacacatatatacagactgctaacagttgagcatgtatttttatggtcattaatatgccagaggggatccagcattatagcttttgttactattatgttctagtaaaaactctgaatgtttgtgcatccagtaatgtgtgttcctgtagtcaaatgtgctagtggtaattctcatcttcttctcaactttaacttcttattcagcagatctgagggcaaggcctattttatggtttacatttcatcttcaatatagtgaagtcgaaagctctttaagcctatagttactaatactttgtcaaagtctcatcaaatatggcgactggattgtcatcttacccctatttcaaaattttctgaaatacctcatcttgtctcagaatgtttttcacttatctataagcctaccaccttttaagagatactgtgttccatgaaggcataaattataaatatgttatcattttaaggtatgattacaaataattatggttttggatagggaggaaagaaaatagggagcatggactcagggatttctatcttggtttctttcctacttaagagaaagggggttgaaaagaaaaaggagggatatagaaatactataaaaattagacaaatagggtatattgaatctattcttaaaaacattttatagcccttatcttacattggtatataagtttgtgtattgttacaggtgtaaggttgtcattggcataaacctttgtatattgagacaaaatttaagattaaaattaaaattaatattatatttcaactcttctataggcattgtgcctatgtaactcatttaaaagtaaaagatttaatcctaattattttactagctgctattacaaactgtttaagataattaagtaatgcaagtaactaaccagtcaatcaaactcatggtcatattaaattctaatctggattatcacagaaatatacatccatgcttgaacagataatagcattctttgcttgtttggatttgctataaataggcaaatggtcttcaaaagcatcagagactcacagaatatggcatttaaggttatttcattattaaaagaacatttgacttagagtcacttctgctccagacagtatctccatcccattttaaagaagataatgagctccaatacctccaagtagagttacttttattatggcaagctagccactgggcaagaaatgccctaactttatctgcagacaaaatgctgtccaaaaaggacaaacagatgccagatagttgactgctaagctctgccaagacagtgtaagccagttcttcataattcctacctcacttaaggtctgtcagatgttttgagccaaaaggctaaagatagatactccaaagttataaggaatattgggaactgtcctggtggtaagctatctctataatttctatgatttttgaaagctgtatccctgcacttccttcatacttattccttctgagatctggttgaagactgcatgtttatagtctcacaactatgcttcagttgtctaggatttaagaagatactcttaggatggtaatacaaattaaaataagaaataatttaaatacaaaattataactcaccaagataggatagatgataaaatactttatctaaattgccaaatataatggaccaaacattaaaaatgtatatcatgtattataattttcacaatcagtataattgtgttcagtttatatctgatagaaaaggaggcttttattggactaaaaaagggacttgttgaggcttgatcttttgctatgtattgtaatgctgagtgtggcccccaatacctcattgccccagaaaggagtccacatgtagatccaaatgatgatatgtgaccttgctcccaagttatttcttatttgtaaataaagatactaacagccaatagctgtgcaggggagacatatgagacatatgcagcctttaggttaccaggctcggggtgaaagaaaagcaatgagtggaagaagaaactaaacggaggaagaagtcaccatgggatatgaatcttaatataatggccatgtgggttggctaagtggagttaaaagcaacccagatgaaacatggaaaattatataatgggattattggatggtaaatagatataataacatacacgatagatatctgctcagctcttatgctgattgaggcttattataaatataaagtttgtgaatgtcttttatttgggaactaaatatgcgtgggttcagatttcaaaggtgggttagaaaccccagattgggattaaaaatttctacaccacctgtttttagcgatgaaggcatatggcacacacagcaaagtccctttgggggaaactaagactgagatgaaaactcttcctgaatatctttgctgttgaaatctttctttcaagataaactgctcctgaaacacagttcctcatatctgacttcatgatatgactgtctttctctatcagctctacaaagtacacatcagtctgcagtctaagtagatgcagagtacaactgctttgcttagttgggtttactaactacatattttgtggatcttgttagatctgaacaatgaatacctgggaaggtaccagcttgtatggtacaggggctggataaaccaatactttttaagttcaatgaagtaaacctttctccccatggtgaactgtaggtttggagatcatggcagattcagggcaggatcaatttttactagaaggagatttttactgaggcaataattttggatttggatttgccatcagtgtcctattcaatggatgttaactaacctgaataagactttgcatttattagttcatactccttcatttgcagacagactttcaggtttcaagacatagcctaataggaggaaaatatctggaacagaactgagcttggatccttaaatctgaactcatgcatatttctgtctagctttctatttgagtgttctttcgatagggaagaactgtgtgtgtgaactctctgaatatcaagttttcattcaataaagtatcagcacattacacaatcttgttattaaaagttgacttagatgttcagtttcagagatgtggtagctttctgtgagtgctgcctccagaatgtggcattttagaggttatataggtatacttgattgtgtttggttttccttgaagttcattagtgttataactttctttattttaactcttggggcagcatttgttcagtggacatttcagagcaggggattggcatctctgataaaaagaaatctctaagagggactgaaagaaaagtatagaaacacacactacagaaaatactaaggtcgaaatatcttgggttcctctgatttcctttagtctgaatataaaggccatgaattgtatcagtgtggatatgagcatcaatcacttttgaggttcatgttacacagtccaatgtaatttttgtttttacatgttaattgttactagactggtaacttaacctacgaccttgtatatggtaaccactctaccactgacgtatactgctagcccttccaatataactttaaaaaattatcttattttttttccatttttttattaggcatttagctcatttacatttccaatgctataccaaaagtcccccataccnnnnnnnnnnnnnnnnnnnnccactcccctacccacccactccccctttttggccctggcgttcccctgtactggggcatataaagtttgcaagcccaatgggcctctctttccagtgatggccgactaggacatcttttgatacatatgcagctagagacaagagttctggggtactgcttagttcataatgttgttccacctatagggttgcagttccctttagttccaaaatattcagggaaaaaaatggaagaaataaaactgatcataaactaaactgaattgaaacaaatcatttcaatattcttattatttgtattaatttctacaaattatgtatcttaaattcatgttaaaaatttggacaatctttgaaacatctaccataactatagttagagagaggtctagatctaggcaatgtcatatttttatattaaacgtaatttgttaactcctttacttcaatgaagaattcaattataaggttctttctttatattagctccatcactgtaaatacatgtgtcctgtataatacaattttgcatacatatagaacacagtggacattatctatgatcgactacctgttccccacctactcaagaaggcagtatgtagttcaacatggagatttagaatttaaaatcaaatttatcttaagagtaccgtgttaatatactatgctaatattgcacaccagcccttaaagtttggtagagtagaatggatatcttctattatcataacaacattgccattagctttctttatataaaatgatggcatttagactcttataatcattaaagattatcttttaaaattgtttctaaactaccttatgtaggcaagtattatggtacacgtgtgtagtcccaactactaagtaggcttagagtagaggttgatgatttgagtctccaagttcaagatcatgtttcaaagaaaacaaacaagcaagcagttcatttggtgaactcaccatcactccctatgaattatttcacacttaagctatgtttcttagatacatttttttataaatagaattgaattatcagtcaaggttatagtcatattaaaaagactggggtgcactttgccactaggtgaagaaaattttgtctagggttagatgtctttgaataaattttgtataagctttgctttgtatatatctgtggttaagcagaatagtcaatttcagtatgtccaaactcaaaagtccctttgacataagctctactatgagaattttggataatttgattatagtataatttctttcttttttatttacttgataccatagcatacaagcaaaatacctgtaagattaaaaactaaaaggccaaacaaagcaagataagtaaaacatatctacaaaaacaccattgaatttgttttgttttagcgatctactgctagtctggtttatacacctggtgagactccattttacataaattctatgcaaggcaactacggatatttaacatatacagtttgatgattttgaccacatgtaaagacccatgaaacataccaacaaccaggatcataagcatgcctggagttgttaatgatttctttaagaaaaaagttttatttatttattcatttatttatttcatgtgcagggtttagcctgcatgtatgcctgcacatcaaaagagggcatcagatctcactagagatggttgtgagccaccacatgcgtactgggaatttaactcagtacctctggaagaacagctagtgctcttaaccactgagccatgtttccagccttcaacactttcttatatccctttcctggatctagaatgacagacagttgtggattgctatgtgagttatggaaactgagtctgggtcctctgcaagactagaaaatactcttagcttctgtaccaccatgtcaatcccaaattgacctttttttttttttttttttttggattcctcatataaatagaatcataaagtaattattctaattcacccataatggacatttaaactacaatggtacctttcagattcctcacttatgccacaaatttttaaagatgaaatttttaaagaggaaaggcggagtaatatttagtcacgtgtgtgtgtgtgtgtgttgctattttctatctatggatagtttatgtcactaacattgaatacagatatccctatgtccatctgtcctctctcatacattgaattaaacacagtttgaagagactgggataactggatatcagaggaggttgggaaatcaatagaatgattgacaagaaatgacaaattttgtttccactgaaaattttcaaaggatcaaccctttcaaacttcctgagcgaaggagtagatgattctgacaacccaataaaaaacacaggcctcctgtgattggttggaagacagtttcctaggcaatcaatacacagtgtgtttcatgagctaccctgggcttttcacagtatatttcatattgggatgttgattaagctctagaatttaataaaagttctatatttggatttcaattatttgtcttcacgatttatttggttttgggccaaaataaaatattaacgaataacaagtgtgctatattgttgtaagcaaaacctagtgaattgcttctttacctgagaaaacacctctaggcatcatacagaaatgactagaacaatattgaaaagcataggaatcgttcccacaacaaacacattgtttgcaatagaactgattctaagtaagatttgctttttttttttttttttgcattgtgcacctgcctgagaaattcggggtaagaattatgaaaagcatttatttaatcatcaactttttcatcctcatacatatgtcaggcagcctggggcacagtaagatgactgtaattttatttgaattcagcatctgtccatgaagcagctaagccacacttgttttccttaggagattctatctgaacaaccttttattctccatccttttttttttttttttttttttgaggtatgaataggacatgtcagactatcccatttcactcttgcctcttctaaaatctcattcttttgctcctcttaaacactgagagtatttctagcctgagcatctttagttcctttcattgacatctattcgtttccaaatgtcaagcagacattttcattttggttggctttgggtagggaaaaaaatgagagagactgcatttccccaggatcggacttcatctctctagtgtttatagcccacatgattaagaaccaacgaattgacttggaattaaaaggcaccaacacaaaaatctccaccaagctgagggattgccattttattccagagatgcaatcacccaatggcatgtcttgcttttcgtattcctcatgaaccactcattagcatgatgacctccaccaggagagcaactcactttcctttactgagccatcttcctcaggctgtacagtaatagtaacaaataacgcattcctttaagtgtttggctttttattaaaatattccataagttttgatttaaacaagtctaagaagaaatgtattcgaatgttttaattaagtcatacacgatagcttcatatatttgtaggatctggtagggatgctgctgtgaggacatagcagatccgaggctttgctatatccagctcttcatcattcttttcattttcacatagcaagtttgaaagaatataaactaaaatgttgcaactgtggggacccactctgcagattcaagctcctgcataactctaatatggtccttctaattggtctgcctaacccctaccttgtcaccgctcccatcttctggtacctgactctctgccctctgattcacttactccactaggtgtcatgcttttaaggttatctacattgcagcatgtgtcggaaggtcctcccctttaaaggttggatatttcaccacatccagatagcatgatttgtttttttgttttttttttcattcatcctccagtgtacacttggatcacttttaacatcttggcgattatgaataatatccctatgtgagcagatctacaaatgtctactctaatctctgccttcatttctttgtgtgtgtgtgtgtgtgtgtgtgtgtgtgtgtgtgtgtgcctgagggtgtacatgtgtatgtgtgctgtatgtatgtatttctctgtgtgagtatgtgtgtgtgatgtatgtttgttttcctatatgtggtcacgtacacatgtgcttgtaagcacacatacataggtgtgcttgttgaggtcagaggtcaatttcagtctcttaatcgattggtctctatcttgtttttggaactggggtttctcactgaacccagagctcactaattcagctaggttgctggccagcatcaggaatccacatgcctttgcctcactatcaccgaggaaggccaacagaatcaactaacctgtacccttggggatctcagagtctgaaccactaaccaaagaacacacacagactggatctatgcctctccacacatatgtagcagatatgaagcttggtcttcatgtggatcctcaacaactggagtggggactatcccaaaagctgttgactgaccatgtgggaatattcttatagctgggctgccttttctgatttcagtaagagaggatgtgcctaccctcaaaaagacttgatgtaccaaggtggtggtggggggagatatccggggccccacccactcagaggagaaggggaaaggggatggaagaaaggattgtgtgaggggggtgactggaagggggcattgagtggtatgtaaagtaaataaaaacaaacaaacaaaaagcaaaaaaaaaaaaaaccacaaaacaacattaaaaaaaagaagaagaagaaacccaaacaacaacaacaaattcccaattcagtgtgccttgcttttacatgcctgctaagtgtctgagttcaggttctcatgtttgtcctgaaaggactttatcaatgcagttcattttcctggctccttcacctcaattttgtgtcttcattttgtaatgaagtcaagcacattctctgtctggcagacttttcctttttctttgattctaattctatattcaagtaaaatttgatgagcagcaccaagcaatgctgccacatcagatattttcaagacccaaagagattccaaaggaattagaaatattcgtctacatttaaataaaggttagacctcatttgaagcctaagagggacaggaaatgtacaaggcagtataatattaactttcaagcaaatgaagagctagccctgtgctgatcgcatgtgctgtgtggactgtgtctatagaccacaggccaaaaaatagtaaagtaggattctaggttttcagatataaaattgaatattctaccaagctgcagtatgtctaggtttttatttggtctctcaaagatgttatctataaatttaagtactttttggagttaggcaagcaaacatatccaattgtctttgtataggatggaagggaaaagaagaaatatttttaggcatgattacaaaagcaaaattcttaaaaggtttttttaatcttacagcaattattagaaatatgagaaaagcctacaccatagatctccctctaaattatttccctttttcccttaaaattgtggcagtaaagggtttatggttatattgtggagtcctagtaactcgtaatggtctctggagataaaagcgttgtccatcacagattgcttcagtaaagaccctcttctccctcacagccattggtgaccacatagaagctttgttttagcggagcaaaaggagacatggctcagttatttatactactgtacctcccatagcaagtcctaataaaaactgatcttatattaggctaaaaaccagctcgatgagaagatttgattggctgtgcagtgggagttgattaaatcttatttgctgcatttaaaaataattgttgaacaatgacgattaatggcttgaactttatgtacaattagattttagcagtgctccaatcaatgaggggcttcttcagcagcttctcacaacaaggtactcgctgtcatttatacaaggtcaccagccaacagcttcaaccgaaacatcggctacaaatagagtattttattttattctgtctgagctctgcgtcatggactgagaaaacgtatatgagttgccagcacctcatattttaggtgtttaaagttattttaaatgtttttgatgatgaactttttctacatgtccagaaaagatctacacagcagcagaaaacaaaacaaaaaaaccaattaagtccctattgcagctgctctaattaatttcccactcatttccctggaggaatcagagagatcctctctttcccttccccagtggctctctaccaaccctgtcttttcatgcctttaggcatgaacttggagaaaattgatgtggatgatggacaatcagagcatgccttgtggagaatggctgcttgtctgctgtgtagtagcaatacataccagctaaatgtgagccctgaaatgcataatatgtaaagatgcgctggcttttacctattagtataatagaatcttagagttagtgaagattgaaaagttgtcagatgtatgattcatacaaagtcttagaggttatttgatgggcacaatgaagtaggctgcctaggttctttctgtcttctagggtcacctactccttcagtttcctttcatttttattcttctgccttctgtgtgtgtgcttgcacacttgcaggcacatgaatggatacgaacacatgactagaatgagggcataaccttgaggaaggccaagcatctcctttgagacaggatctgagtttcttctggagctcttcaactagtctttgttgattggccagtgatccccaagggtccttctctatctgtgtccacaaccctggtattatacatacatcccatccttaatttacacacacactctctctctttttccctctctctgtctcagtgtgtgtgtgtgtgtgtgtgtgtgtgtgtccagacatgtgttgtagcacccatgatgggtcagaagacagtcattgggagtcagttagttctctccttccaccatgtggatcctgggaattagattcaggacaccagctgtggtaacaatcgtctttaccattttagcatcttgcagctccctagcctttttttgtgggttctggggatcaccctcgagtcttcgtgcttgataggcaatttagctaatctcctgcacccactctcatttattctgagctcatggagacagttataagacatgtcttttaaagtttcacttattctttctttcttctttctctctatcttccaatgcttcctgttcttgtaagtaaagtccattccctacccttagccctagttcccaaacgatcctctcttcattcaatgatcctctcccaaaacattcttgtatatagaaaaatgtgataaagttgaggggaagagctctgcactgtataaccaggggatccaaacactgtgtccccgaaaaaggaagcagaggaagtgaagacctagaacagcatcctgaagtgaacacgagggtaaaggcaaggggcagaatgatgccaccaccattttcaaccttcaggcatttcagaggaacatactttaagccattgactgtgtgatagtttgcagctgtagctcatgaaaactaatgtagtgttccagtgttccagaacttctcgaaacacgtgaataaacacgtgtttgccagacattttgaagttttgcctaaacagcctagccaaaaaaccctcccatgagttacttatttgattaattaattcatcattcgtgtattgagggcttgatagatgttgaaagtgtaaccagcagaaaaattgccaggagcactgtgcataggaggatggagttacaagcagtcaaggctgaggtttcctggtggaattccaaagctgtgcatagcaggagagagaacaaggtaggatgtagaataatctttaggattgctggcagtactctggaatttgcatgtgcagtggaacaggggtcccagaggcactatataaaggagatcacttggcaaccctagttttatgtggaaaccattcctctttgctactgaagtagggtagaacttgctattgtctggtctctcgatgttgcattgcttacctgaataatttgatcccaaactccccatataaagtagttctttttctatgtatgatcatatctatatagctacattgcttggaaattggatcatagtccagttctctgtggatgactgtgaatttagttctgggtaatgagtatttttgttacttaaatttatattgaatttctatgcttgctttatattaggtgtattaaaaatagtttgcattctccacatgaatagcatactgcattgttttttcatagtggtgagggacaagaaggaaaggacagcagggtccttgagctctgctcttttctctgttagacatggatagaaaaggccagaaaagaaagatggccctccctacaccaccctgtctttctcccttctggggtgttattttcctggggttcctatctcttgctgtgttcagtgcccacctctgaggtgttgcccatctattccatgtgtaaaatgcagacagcatcttaaggttatgtgaattcccgtacagagcattccattaatactgatgatccctgtcggaagcaggcatttgttagaatttgcaagtcaggaaacgcattcaagctctctcttacagtgaaggtagctgatgaactctctattgcttgtaattcccgaatgcaaatgtcactgatcacgatgttaagcctttaattcttaaattagtctgtgatacatttatgcctatgtagttagagagcaaaattctcaaatccagcacattactcatatgtctcagggacacatgcatttttttaaatggtaaaattaaatgtatttacatagctgtttgccaagaaaatgaaaatgttttaagtaaatattcttggagctgagataagaggagctaggacatgggtggcatttgaatatttcttacttggctgtgatttcagaaacacaatactctgaagcatttataggtgcatttaccagcctcctggagtcctcacaaccaagggaaggtgccaactgctctcctgggaggctctagtgtgagtgacctgaagttcatgaaaataatattagtccagaaggtgtctgtacgactaaaaaaagaaagcaccaaaatcagaaacaaaacaactccccacccaaaaaactaaaaccaatcaaaaccaaaacaaacaacaacaaacactccgccccgcccacaaaacctcctccacctttgcccaaggaggtcagtttttcagatgaaagacatttaatcccagagccaaagagtcctggcaaatttcccacatttaaatccaatgccctgatataatgtcactgctttgtcagatgtaaaaagccagacacgatggggaagactgccacctggtggtcatataaggttactactcaagccagcttcctggttggttgtttatagctaaactttaacatatatgtcattattaacttgcattatttggctaattatgaaagcaaatgggtttctgtgtgacactcacatacatgcacaataacgcacactctctcttccctactggatcctgctccatgttcttagtacccataactcgatggtaataacctaatgtttaaggcaagtgtacaattaattaaaacttgaataccacagaggacaagtgagcaatattctattttatttacttcctaaggctaagaaacacataaaattcatttctctcgtgaagaaacttcagacaacattgttactttttcctaacttcaaagactgcaataacaacttttcacactcaaagtaatctcttatacataaggaggctaatatctctgaagttgtttttactagttgatggatatgtccacacttatttttgaactttggagaagacaggatcattgtcaatcatgtaggagtattgcttaaagcagtggtgctgggattttgtctggtcctgtgtgtgtgtgtgtgtgtgtgtctgctgtaacagtgtctgtgttctcctatatgcatcatccctgtgtcaggaaggcactgtctccttgaagtcctcattctctggctcttaacaacctttctgcctccattgtacataaaccttgagggggaagatttgatgcagatatcccatgtagggtcaagtgctccgaagtctcttccttcctgcacactgtccaactgagaatctcctcgatgatttctttctacagtaagaagaaccttctgataagggttagttctttatggatatagccatatgtcattagtagtcattttatcgctatgttgctttagcagaataatgattttcttccaggcctatgacctaactaatctcaggttttttgtgtgttttatcagagttaggtatgggctccttctaatgaaggaagtcttatatatatttttaaaaagtggatggccaccttcaaaatttttggcccagaattgtacctgtctgaagaaatgcagagacaaaaatggagcagaggctgaagaaaaggccatcaatgactggcccaacttgggatccatcccatgcataggcaccatactctgacaagattcctgatttcttgttgtgcttgcagactggagcctagcatgaatgttctctgaggggaccaggaggtggggcaacattttggaagtaaataattaaaataaaaaaagtgtttggctacacctatgtgtgatatttctgtaactattgcagtagtatgtctcccatgtcacagtgtagcttggtgtttggctacacctatgtgtgatatttatgtaactattacagtagtatgtctcccatgtcacagtgtagcttggtgtttggctacacctatgtgtgatatttatgtaactattacagtagtatgtctcccatgtcacagtgtagcttggtgtttggctacacctatgtgtgatatttatgtaactattgcagcagtatgccttgcacatcacagtgtagcttggtgtttggctacacctatgtgtgatatttatgtaactattgcagtagtatgtctcccatgtcacagtgtagcttggtgtttggctacacctatgtgtgatatttatgcaactattgcagtagtatgccttgcacatcacagtgtagcttggtgtttggctacacctatgtgtgatatttatgtaactattacagtagtatgtctcccatgtcacagtgtagcttggtgtttggctacacctatgtgtgatatttatgtaactattgcagtagtatgtctcacatgtcacagtgtagcttggtgaaattaataatcacctttcttctccagttacccgcgaagcatccttcagcatcaggagccctaatcagagtgttccagtgaggagtagagataaacaatattttaattagtaataattgctattttataatttagttcttattttgttcgattgctttacctatgttgttctactgcattaagaaaatgatggtgatgaacacctaaacatttttcttttaaacctgtgatcattacaccagtttttccttagtcatcattttctagttttcaaaaagtaagataagccgtcttgcgacaaaaagaaagggcaaaggcttattcacctcacaccacattaggaggtaaaggatatagaagccataaaatggaaaaaaaaataacatggatataggtctgcaagtgatcggttttcagacctatgcgttggtttgtttggtacttgagaatgatgtttagtccttcacatttgtgtttcacttattgtctttgcctcttttgctgcctctgtctgctgggctgatgttaattatacactatgcacttttaatgtacttaaagtctttataataccttgaagctagatcttggggtctttttgtctgtttgtttttaagatttactcatttaacatgtgtgagtacatagtagctgtcttcagacaccagaaaggacattgggtcccaggacagatggttgtgagccaccaagaggttctgggaattgaactcaggacctatggaaaaacagtcagtgttctctctagatcttgatattccttactcatgtcaataacttcttagtttgtaagcatctcttagtgttacttttgtcttctgacttattaagtctccctctctccagagtgaatgcaggagtgggttagaactattgtttcaggtgggatatatgcattgtttataatcaacttgttctttgaataatttacctttgaatttacttttccgtgtgtgtgggggtaatatgtatatatatatatatatatatatgactttaaataggtgttatttatttatacagtatagagatatagagaaatagcatgctcttttttttttttttttttactttcttgaatgagaatttcaaagctgggcagtggtggcacatgcctttaatcccagcactccggagacagaggcaggcggatttctgagttcaaggccagcctggtctacagagtgagttccaggacagccagggctacacagagaaaccctgtcttggaaaaacaaacaaacaagaaaagagaatttcagattagatataaaaggcactggatctaaacactcttccctcattaactcctttaatatgcactcagaagtacttttatatatggtgagtctggctatactgaacaatctcatctatattattgtaaatttacaacttttcccagggattctacatctatttgactggtgtatatatggggaaaacagtttcctctattctcctagattccttgtccagggggacataccgaatcgataaaaagcaaataaataggggaaaagaccatagttagttaacatatttgtgcactggaatccatgaaatatgatatcttaacaacaatgagacacattaagtttatatctggaatacagaaggaaatttggtactcaatgaagaagtgagcacacagagtcctgttatgcagataaaaggtcctggggtaataaaacaagtctcagagcaatgttcattcttctcagaagaataaatgatagtttgttctgaagctgtgtggacctcatcttttcccttgtgttcatgagttaatctttcctgggtgatgagacgatctggaaggagtctcaggaagactgacataagctctgcatatgtacaaataagagctcagaaacagcctctgcatgcactggtcattcagaagcctaaggccaaagtcactggctcagcatgtcagttatgggaactacattggtcaaacccctctactgaaatattgatttcttcaacaaggaatacagcagtttaatggctcttttgtagctgaaaatctttagaacgcattcatgctagatgacttctctagcactccttggaagtatctttgatcttttattaaataaacaaacactgttattccacatcgtaaaacaaaccatgcaaagtagcccaggactagtatcttcacccattgatgcatatgatctggaagaactagcctgacaattgtcactcagcacttagagattggtaaattccatgacagattatctctgtcttcatttcagtccagagtcactggatcacagggtctacaaggctagcttgttctttcaggagactcttaggatctgcaaatgtgagctctgaaaacaccgtgtcgtcccccccccctttttttcccaaagacttgaagttctaactgtatcacacacagctggagaagaacccactggtttgttttgaatttgcaacagggcatctgaacattacaaaatgagatagtgtcaatatattgagaatttaaaggagtttgtgtgctatctgtatttgatgggtttcctctagtgaacagtcagtattatataaaaatactcactgtgtatttatattacctacttgccacagatttctttttcattgacaggcattgctccattcagatccaatatgaagatttttttaaaactggaattttcacaaacaatattgactgacattttctctcaagatatacacacttttgaacaaatgtcatagtgtgttatttgggtctaatgtggtaggactgtagccactttggttatactattttagctggcttacatccaatcctgtatggcaaagtcattaagatgttcagctgagcattttgtttcagccactgtctcttggctttatttcttcctaatgttgaacacactaattgttttgagaaaatgtacgtacttgattggttgttcacagcctagcgctgcttagctttgcacttaaccaccttcatactttgcaatataagaatttccagtcttgtttcttttgcccatgacttgcttatatagtctttgatctgtcaccctttcttggtcttacaacagagccttacctcttggaactgggattttatgaaacacgtgctggcttgaattatgtttaaactgcattttgctttggtcaagtcttcccttgctacctttcccttcctccattttggaatgggaatgtttagtctgtgctagtgtgacaattatattttgattttatggggctcataggatttagttccaagtctcagaagagactagacaatgttgaagctattaaaggacacagggacttaggaagttggactggctgcattttggatatgagaaagacacaatcatggttagttttcattacatgtgaggacatttaaaatcacctaagataaacacctatggatatgtttagagataattctccaaaatggttcaattgggggaattattattaatattgactgtgggtggtgctagggtacaagatgaacaaaagcaaaaagaagacatgaacatgaactatttatctttctgctttctaactatagatataacgctgacccacattgtacttcaccttctgtgccttcctatcacaatggacaacatctcttcttaaagtgagagagaaaaaaaaaaaacctctcctttataagaaaaagtccagctatcttgtttacaaccttggtctctacctttttcaaaaatttccatactgtggcttcttctttgcttccagagaaatattgagtcaagtcctctaagaacacaggcaagtgtcatacaacccttgtactgatcaccaacatccaacctaggatttatgaaacattttttgaaacccagtggatgtttcattactttgtatttaagtcttgatctcatgttttaggagaaaaacattttttatatatcagttttacttaaaatagaaaaaaaataagaacacctaaaaattaaatagaattcgtgatgcgtcttcatgtactcaacccttaacttcacccactctcaggccaaagccaactttgttctagcatattctttattatacctggggtgtataaaaaataagtcaaacatatttcatttagtttcatcaataaattcttcttttaggggtaactctaaaagacaggtatatttaaaacaaacaattcaatagcataggtgaagcattagcaacattacttatcaaaatcatcaagaattatgctgggcgtggtggcacatgcctttaatcccagcactcaggaggcagaagaaggcgaatttctgagttcgaggccagcctggtctacaaagtgagttccaggacagccagggctatacagagaaaccctgtctcgaaaaacaaaacaaaacaaaacaaaacaaaacaaaacaaaacaaaacaaaattcaggtaaagacacacatttacctagctgtctcacaaaatgttttttttttgttgttgttgttgttcaaaccatgatctagattattcatatactgcaattgacttgcatcaatttatgtcttgtctttttatacttttgcttttggagagtggaacacatataccactgtgtacatggaaaggttaaagggcaatttgtgggagttgatcctctccatcatttaagttcctggggtcagagccatggttttgagtttggtgataagatacatttcccattgaaccgctggaggtcagctctggctagagactgtgaactggtactgagactgaaccatcttgctggcccctaattttatgtctttttgaatgcgtactttcttctatttttttctcagcatgttgaaagctaaaggatattttctgtagaggaggacacggcatgggttttgttgattatattcctgtggctgcaggtgaacatggtttggaatggcggtcacatagtgattcgtggcgaaatgaattaagtggtggttttttttaggatcctttgttatcccacactgaactagcatgtgttcaaagcctgacccgagggcaagcatctgcacaaagtgttctctgcctttttccctgtatatttgtcatttaatttcaaggcttgatattcagactgtttacctaggaagaatactaccagtgttgtatgtttctgtggaggttacaaatgcatgaatgcctgccttccttcctttcttcatccccacctgccattttccccccttcctcgtatttatcttcctactcccccttcttcttcctcttcctcctccttctccttttccttttccccctcctcctcttcctctccctcttcctcctcctcctcctcctttatagccgttgatcatagttatataacagtagaacagtactgttttctaggtcttgattttgtttccacatattcagtgtctttctagccagggcacataacaacatacactaccgatctcaggggattacatttattatagattcaatgaatccaatgaaataaaaattatagtctggggtttacatgaaattaaactagataaaatgaacaagtatttattttaaatcaccaaaatcaacctgtagatttaagataatagaaacattgctaagaagtgaaagacaagctccagaagaaagtgtttgaaaatagctaaggagtaccaaaataacttgttttcagagtatatatagaatttatactaatcagtaacaaaaacacagacagcttgatagagaaagtgaacaagatgctcaaatccttactatgtaaaagggtgtgctatttagattggattgtctccttcagtgtattgaaactatctagtaagtgagcacacatgtttccagagaagagtgactcaggagaaagccctcccttgaatgagtgatgcattaaatagggaccaagacatactaaaatatgaaaaaaaaatagaaaaccagtgagaacaggaattttctcttgctatatcttgtcagacaccttgtgaactatttcagtctgcaatacccttctttttacaaaaaaaaaatgtagcatcgaatgatgtgagctaattaaaccttgccctccttaagttggtgctcaggtatttgtcacagagtcaaaaagtctaagtaatgctctatgtattcagaataattacttgcggcaacccacataacactgtttaatttctacagtcagctaggaaaaacaaattaaaatcaggatgaggtaacaccagcacttcagaacctataggagttttcaatagcctgagagttgcaaatctctgaaagagtatggagacactggactttcacacactcatgagtgaggtattctaggaaaatgttgtgccagatttacaaaactggccatacatgaccaagtgaggacacactatatttattactttgctcattgatatgaaaaatcacaccagaaagcaacttaaaggatgaggagcttcttttggttctttgtctataaggatgaaatccattatggagaaaacatgactaattacccatatcttgggacatcaggaaacagaaaaagagggatgctcgtgctcagctcagtccccacctttacctcagtctggaccgcaagccatgcaacgatgccacccatattcagagtgagtttttcttcccctaatcttctatggaaaattcctcacagacttacccaaacgtgtggcattgctatgttgttgataatagaaattaaccgtcattgattcttacagaagtatgcacaagtgttcacccagaagaaaagcctaaaagaagagaaacagaaatgtttagagaagtatcatttgtaataggtaaaattagaaacaacccaaacagtcttaagtttatgtttggcacgttcagtcatggaatgtcctatgttgtagataaaaagtaagaacccaaccagaaaacagaacatacagtgtaattcaaagtgcatggagttcaaaacagtaatgaaaataaaatatgttaggacaatggtttgctttggagagaaggactgacattacactgaagcatgggggagataccagggccttaatattccatttccaggttgcggatgtggggtagtagttccataggtgaatttgatttgtattgggtcattgagccatgtttctcttactaactcattgaaagtaaataaagttataaattgtacttatatgtgaaataaagcttttttgtttcaaaaacgtaaaatagacatttttctcacatttctggtatttctttattagttacattagaaaggaaaaaagatgaatttattatgttcatcgaaatctcagccaaaatttgaaattataaacaagaatgaaaggaagctttcaaacactcttatgtgacaatgcacttcaccatattttactctattatttgatgttattctttgacaaaattcagattattataattaatgatatgtatttaaactaagcaataagaatagaaagataattgtctgtaattttccattgtttaaaattattattattaatccaaggctttgctacatttaaaatttagaaaaataatgttaactctttaaaaattggagtctttaaaaattggagttaaaatgttatatattactaggtacactattgatcactaaaaatagctaaaataatacaaagaatcaatgtagtgacatgctaggagcatttgttgttgttgttgtcctcgatttgtctgtttgaaaaactacctataaagatgtttacaaaattttgaagatctcactatacaacatctgtatccagcctagaatgacattgagtatttgataagctcaaaataaatgtaagttattatttgtatgtaaacataactcatcaagagaggatattatatatatatatattttttctaaccatttataaaagtttccaaataattaaagtgtactctaaagccgccaactaagatatcaaagaggtcttttataagcctgtgtgatgtgaacaaacactggggaagatgttgtcagtgtagcagtgtagcatctggataggcaatgagcacatcactctgcagacccagcagagcaggaaagaagagtcagaaaacagcaacaaaagggcagcattactaaagtcaggaccaagccagtgagggcttagaggaggagggtcagtgggtgtcaaaactgtaagaaaagtcgttgatttgggatgtcaggacgagaaaggcataggaaaacccataatccagggaagaggcactcattttagaaagtggggagagcactttgtgagccagaaattgggggacctttgagaaaataacaaaatgtcttttcacctcagagtaagcacgaaggaaagaaacagaaaacaaatccactcatgttagctgggagaaactatgagttgccctagggtcacttacatgaaggggaatggtgggttacttgcaggatatgggcatttgatgagctcctacaaaactgaatgcaaacgatctatttcttcatcaaaagttacaggtcagtatattgtcggggagggcagagggctcaggaaccctctctcctctagtaacaattatcaaccataaatttgacagagaggactggccttgagacagctgctgtgccacctcccccagcctctcgtcccgcatgacagaaagatatcaggctcaatcttgggcggaagtcctttgagtattactgctgacagttcaggaggccagaggatagatctacccaacagtacttgatgtgccaatgtgggttgatacccagggaggggcctcccctttctcagaggagaaagagacgggtgggggaaggggtgtgtgagggaggaactggaaggaaatttggggatgcaatctggatgtaaagtgactagttaaatgaataaataaataataaataaataaataaataaataaataaatagaaaaatgtcctattgtatctgcctatcaccatacgggtaaaaaagagagacggggaaatggaaaaaatatggtaattgattccagatcatctcaacttattaagtaattaaataggtttttaactccaagggtttctagactgctatgattatgtttggtaagagggatgggtctgacatcttttaccttacaaggaaataaaacagatccagagataagtgaggatagaattgtaaacagagacttacatcggagacaagttgtaaattgtaaaacattggagttggtgagagaaaactgagagactggcaaataatggatggaatagaagctgaggctcttgtaatcgccacaaatcagccactggcaggcagcttcagagaggcctgggaggagaagtgagatggggagacagtagataagaattgaggatggaggggaagcacagtgttagcagaagtgcgcatgagccatagagcagcagattgccatagagccaagatttcaagaatgagaaaattctaaataataaagactactttccataggtttaaaacacacaacaacagcagagacatagaacctaaagaggccacctcctgtaaccaggcaggatctccagtggaaggataaggataccaatctacccacaaaactttcgaccccaaatttgtcctgtctaaaagaaatgcatgaatggagcagagaacaaaggaatggccaaccaataactggcctgacttgaaacccatcccatgggcaagcaccaatccctgacattagtggtactctgttacacgtacacataggatcctagcaaaattgaatctgtttgtggggtagagatgttgctcggttggtagggttcctgcctagaccacaggcagtcccaggttggttcacagcacaacatgaatcaggattgtcctgcacatgtataatttcagcacctgcaggacagagtcagaaggatttggagttcaaggtcatgtgactacatatgtgacggcgtagtgaactcagtaccagactcagatgtgtgagaccttgccacaaaaataaacaagcaacaaagaaaagagctactgtgtgcaagaactagcctcaagagcagagtctatttgaagtggcagacagcagcttgctgagacctcaccttatgttggccacttaagtcattcacaagctttttaattttggcaacattttagtacaagtatgctgcttagcatttctagagtgtgaatgcttgactagagttggaatatatcatactcatcagaactgttcctagctcaaacaactaagtgacattgttttaaatggttgctactttctgttctctgctttttaaaggttcttgtgaaagggtatgttttagttctcagaaagttaaaatgtgatttttaagaaacaaattcaaaataatttcactggctccagacctattattgagcacaccacagctcccatttggcatctgctgcatggttgactctgctggacactgtttaaatgctacattcaaaactaatttcacccctaacaaatttaacctaaattcacattgtttttataccattgtagtttctgtttcttgatttctaaataagatgatttctctgttcttagccaccaattactctcccagaatccaagagttatgatttgtccattaaaacagaaactacgctagcaaacacagaagtggatgctcacagtcagctattggatggagcacagggctcccaatggaggagctagagaaagtagccaaggagctaaagggatctgcaaccctatatgtggaacaacattatgaactaaccagtaccccggagctcttgactctagctgcaaatgtatcaaaagatggcctagtcggccatcactggaaagagaggcccattggacacgcaaactgtatatgccccagtacagcgccaaaaaaatgggaatgagtggatagggaagtgggggggagggtatgggggacttttgggatagcattggaaatgtaattgaggaaaatatgtaataaaaaaattaaaaaaaaataaaacagaaactacgtgaccatagccatgcaaaccaattgctttaagatttgcagaaaagcaaaataaggaagaaggaaaaagaattgtctgtgcactaagagcaaccgcagtgtttatgacactaacatcttaagtaagctgagttggcgtctgcaagagagatgcttgccacacttgcaagaaagcagcaaacgcgtttgcaagtttttctaatacatggtgttacaagacaaatatcaccgaaggctgtagggtttctcactcatctctctaaggataacaattgtctaaattatctatcctgctatctatcctgctctcactttacaacagaaatggggttggttaagtagtgcttcagtagttatgtcatcttcagctaaactcacagatctttatagaagtaggcagaatgattgaactgttcagatttataatatgctcttgaaatgtgtctttggaaatgggtatttaaaacagccttaatgacaacttgaaaggttttatctatgagaacagggtaagatgtttattataggaggcatgataagattttccaatcgcagcggctgatgagatggctttgcttggatatagtcgcagccagtcttggaggaaggggtggcctttgaagagatgggatggaggctcttatctcttatcagggcaacataaccaagaggtacccaaatcttcattttctaaagatcaatggtttcttctttcatccaagagaaaggattggagacacggaaacccttttaaatgcctgattaaagggacagtgccaagtaaattgggttcgaggagagttcagtgtcaacatatatgcatccatggctgtttatatagcttctgaccagcagagggtcagagcccagctcatgtactcaaagcttgaggagctctgggcctgcagggttctagatgccagcacaatgtcccacctgaggaagctgtaaaccaaggctggaggaaaaggtggaaattggcttccgatgtctgatggagtaagacctgtcacatgtggcttcagtggactcccaataacaacataaagaagaaaggaattgaaagatgcaaaatgacagcttctttttttttttttaagtaaggcagctcaaatgcaccttttccccactagtatgagagaaaatatattctgtgcagagaaaggggtcagtaattctatgtgtataattatgtgaaaccttagaatattgtctgaaagagaggatgatatggatggtcagatttagattagttttcacagtttgtgttccttcttgtttaaataccttccccagaaaaatcaaattacatcagagtctcataatgcagaatgagaaacttcttgctgtgttaatccatttggtaatcgatattatttattgagctgacacccgatgaccaaggagaatacacaaataaaggtacaaggcaaaggagaaaaattactttcggcttccatattcttaattgtttttcttaatttaataatatctctggtcattaacttatttgtagtcattcagacagaaatcaaacaagaagccctcacctaagagggtaaagaaagtttacatggaggcctgcatccacttctctcaaattttgtggtcatcaggacatgaatggcaggtgtctgtctcttacagttggagtattataatgcagtctcagaactagtgttctcctaagagctagtgtttctctggaagatggtttcacttgagcatagcacaataataggatcaaagttagtaaagaaatccccaaatattaccagacatttcttcagagttaccgcttatgtttactttctgaatagaaatagtcgagatgttcatacacagtggctgtttatgaatgctgagaaggtggtttctttaagaacacatctgtttggagaggattgctcttttataagggtgctatcttctggcccctgaggatattgcatgaacatacagcctgcctacatataaataattaaaggtaagaataagtctttaaaatataaaaaagaagagcatcagaagtcatataatggtcctttagtatcaccagttaggattcttatgcctagaaattccacagaacaatttaattttgattgtgcaactatggagctaaaaaaaaaaaaaaagcctgatgcatgtcattccaaacgccaattcctctgctcttgccacacattttcattctataagtttcctctgtactccatcttcaacttgaaggttcagtatctaagcagtgacaaagagtgacacccccccatttttgtttcatctaccaggcaattttctaatatactgggttctgttttcacactcagttatagattcttgctttatctaacataactgtcattttcacttgtaatttctataggtagttgaccagtgtaatttgaatcagagatataaaggatagtatataaccatctgtccttcaatgatgcaataattagcatgcttaaaatattttaaatacatatttgatagattaaaatgaaggactggggtagagaaaaaaattcttctaatgaggagacacttagggtgttgaatgagatgttctacatatgaatgccactcagaattttgtccatagtaagatgggatggggaaatagcgatccagaattcatggtagttagagattagtaggcaaataatggaaacgagaagagatgtgttctatagctagatggtgggcatatgaaagcagcaggaagtgagagccagggaccatcaacccaaggataacctgaagacaatgaccatcatttagagtaaatgagtctccagtgcccctgtagccagtgtacgaaggtagaagctgtgttctaaaagaaagtttaatatatagtgaaatttgtgagccacgaaagaagagagaaagtcggagtaaaatgatttgttaatcatgtaaagggaaagaagagagagccaagggttaatagaaggcaagcaggcaatgaagaaataacagtgtgggaacttcatcgtggcagaaaataaatagtaatttatgatgtaggaaccagacttgtggcaccgaaactcagtagaggttgggattgggccagtgactcatgaaccacaagatcctttgagggtccatgttggagacaggacatggctatgaataaggtaaagagttagaaaaccccacacggctcatctgggggagactctgcttaggctctttcagcagatgtacattactaatttatgaaattctaatgtatttctaaaatatctaagtctacaaatgtttgcaccaagaaactcatataaaggtataattgctggcccattatgaatcaggtggctattttctcccatagtggctttatgacaaagttctctaataatatctaaaatgtcttctttagcatttggactatagcatagcataattaccacaaactgcagattttgatccacagctttatttatttgtttgtttaaatccttagaagcattagtttacttgttttgtgtgtgtctgagaggagaaggagaggaaatgctctgtgccacagagtacacgtgggggtccgagcactacttacagggttcaggtctcagcttaggtttttttgtggtttgtgaatgagtcaaataccaactagtcaaatatgagcttgtgggtgccagggatcaaactcaggtcatcaagttcctcaggcaaatgcctttatccacttagtgacccctcaactgtttaatgttatcagttgaatgtggtatgaaaaaaatccagctatttgcccattcatctagtttattgcttagtatggggaatttattatttaatttctaccttgacattaatatattttcaaaagcatgtaattcaacaatcaagaaggtatgtacatgctgaatattattcttttcaaatattgtatgatgatactagtaggcttggcaatagacattattattactgatttatatttttttggcttgtgagcaagtggaatatatgcactgtgatgataaatagttaaatttgctattcataatcaaaatgatcctttgatttatccctggcaataccactaaatagctatcctttgatattagaaggggacttgagaattatctgtgcatgcttgccactttatttttattctctcattaggtattttgaaataccatatttgacaagtccgaggctgtcatatatttgctttgtcacacaacactgtttgggatagatcttggttgaatgaaacagttattactgcacagtattacatgactaccagaaaaaaaaaagtatggcatataattgaaatcacatttaatgggttcatgaagttgtggagttgagccaacatgagttggtttacactggtctaaactggtgtatcctaagaatcctggactcctttagctgtgtcttacctcagcttagacaatttggtaacccacctaaactacagctcatggtctgcttccctcacacaagcttgaacctgtctcatcgcttaatgaaaatgcaggcatgaacaaataaacaatagtgttgttaactcttaagcctccaggtgtgtcaatatcctgttggttcaaaagaagtcatgtgggcaagccaaaagttaaaacagtagggcattttaaaattgaacacaaaggactctgataaataaaagtgcaacagatgtgtagccatcagtgtgatcattattctgtactgacagacagaaccaatgaataacagattaacataaatagggtactgatgaccaggggttatagttccaccatttgtttcattaacctgggtgaatcaggtcattttatgagactcccagtccttatatacttctagaatttcataatcctttcattctataaaaccaacattaacatgttaaattctataagtcattttatgatgaactttagagtaagctcaaaacttgcacacttagattgttaaagtatattgagaaacctaggatttataacttaatttggcatatataatatttcagaactttagagtaaagatcattgtcttgccctcagtatcaaactgactagtatgactggccaaaactgactacctaattttaactacaaatctgctaatattttacagtcatagtcaaattaataagcttctattctgaatttgataaagaaacaaagggctgaagtttaatgtcccccttaggtatttcttagatttgggatcataactgttgtatcttttgaagtatgcaatatgtcagtatactgtcaaacattataacatttcctatgtataagttacaggggcccattgatgctgggccttaataattcatcagtatgatgtattattattctcaaattggccagagaatgttgtcaaatttgcaaactgttgaataaaatgtgtataaatttagaggcgatattgagatttcttctaaataaagcatagaaacaactgtggcaagatggcttagtgggtgagaacacacgatattctcctagaaaacctgggttttattctcagcagacacatgaaatttcacaactgtacctctagttcaagggggatctaatgtcattttctagcctccttaggcaatatgcatgcaagtggtacacatacatgcatacaggcaaaacacctgtaatatacacaaaatttaaaaataataacaagttcacaaaagaataatgcagaattgatacataatgatgtgatatatgataaagtattggattgtctgactatgctgggaacaactgagtaggaatgttctacatgtaaaatattttataaactacacatggaaaaagtaatacatataaatagttttggaagataactgtctcttctataacaactttttactctactcagctggctacctcaaaacttgcacacttagattattaaaatacattgagaaacctaggatttataacttgatttggcatatagaatatttcagacatacagaaatgactttctgtgtaataaatatccttgtcatagttgtagaaggcatttatcttggactgataatttatatgtgcctgtcatttcagagtcaccatgtagacagacccaagaagcttccctcagatgaaagtggccaggattcaagagctccagttggttttcagaatgatgtggctgatgtggagagacagaagagcaagcatgggccactgcagccgcaagcaccactgtgactacatgtcagttaaactataaaatattattttaaccatctacctgataaggctacaacacacagtttcttgcttccatgatatttggaatagagcatgtgtatagaaatcagaggtttggaatcttccttgggtctacccactttttttttttaagatatatcttttttattggatatttaatttatatacacttcaaatattatcccttttcccacccccccccagagccaccctattccatacccccctcctgcttctatgagcatgtgcacctacccactcccacatacctgccctggcattcccctatactggggtatcaagacttcacaggaacaagggcctcttctctctccttggttggtggcttagaaagatatatttgtgtatgtgtgagagagagaataggtgctttgcctgtatgtatatctgtgtaccacatgcatgcagtaccctgaaagaccagaaggcaaatctccagagattgaagttacagaggctaataatcacaccggggtgctaagaagagcacctgggtcctttgtgtgcataacaatcaaatactctttaatcactgagctctctttggagctacccacctaaaattttgaggcagggtctctcactaaacctggagcttgctcatcagttcattcaagcaggctgcctacccagagatccatttgtctctgcctgctccagctctggagttacttattcatgtcactgttcttgtctttctatatgttgctagaagtttaaacctaggtccttccgaacagatacctttctaactcagccaccttcctagactaatcataatttttaaaaaatttttactaggtgaaaaagtaaaacatgcctaatagtttgaaagaggataagataactgagttttaaccggttctcagaccttttctttattcagtgggcgatagttagcatagaaacccaccatcaaagtgcagagaataagacattgatgagttctcagccgcaaatggggtatcgatatcttgtatctctccaaacccagatgttaggttagatcagagagaaacagtgtattcgggaattggctgcaccacagtgctactaaactgccagcagcagctattgcctgtataggacctgagcaagaccaagccagtattcagtttagcctggagtgggaagcagttcaacagtcctcccttctcattgaggagctttgaagaagaggaagagccagctttctttaagggtatgtctcctgttagatcaactacactccagtgtagggctccataccaaggaatatatgtatagcaaaaaatcagagtcaatgggttaataggtaagtaaaaaaataaataaataaaaggacactaggttgatcttttttgttgttttaaattttttaattggatattttctttatttacattgaaaatgttacccctttccaggctccccccaccccaaaccacctatctcatcctccctcccctgcttctatgagggtgttccctcaaccacccacccactcccgcctccctgtcctcgaattctcctacacttcactggggcatcgagccttcacaggactatgggcctctcctcccactgatgcctgacaaggctatgggtccctccatgtttactctttggttggtggtttagtccctgggagctctagtgggtttggttggttgatattattgttcttcctatggagttgcaaaccccttcagctccttcagtcctttttctaactcctccattggagaccccattggggactccatgctcagtccaatggttggtttcgagcacatgcctctgtatttgtcagactctggcagagtgtctcaggagagagctatatcaggctcctgtcagcatgcacttcttggccttcacaatagtatctgggtttggtgactgcatatgaaatggatccaaaggtgggacagtccctggatggtcattccttcagtctctgctccacagtttgtctcagtatttcctcccatgagtattttgttccccttctagaaggactgaaacacccacactttggtcttccttcttcttgagcttcatgtggtctgtgaattgtatcttgggtattccaagcatttaggctaacatccacatatcattgagtgcatatcatggttgttcttttgtgattgtgttacctcaatcaagatgacattttctagttccatccatttgcctaagaatttcattgtttttaatagctgactagtactccattgtgtaaatgtagcacattttctatatccattcttctgttgaaggacatctgggttctttccagcttctggctattatacatatgctgctatgaacatagtggagcatgtgtccttattatatgttggagaatcatttgggtatatgcctaggagtggtatagctggatcctcagatagtactatgtccaattttttgaggaacagtgagtctgattttcagagtggttgtaccagtttgcaatcccaccagcaatggaggagtgttcctctttctccacatcctcgccagcatctgctgtcacatgggtttttgatcttagccattctgattggtataaggtggaatttcagagtagttttgatttgcattaacctgatgactaaggatgttcaacatttctttaggtgcttctcagccatttgttattcctcagttgagaattatttatttagctctatcccattttttaatagggtagatttctcctttcacaaatatgaagtgtacttatttatcttttttcataacttttggttgaaagtcaattttattttatattagaatggctactccagcttatttcttgggaatatttgcttgggaaaattttcttcttgcctttttctctgaggtagtgtctgtctttttcctgtatgcagcaacatgctaggtcctgtttacatatccagtctgttagtctatgtctttttattgggggaattgagtccattgatgttaagagatattaaggaaaagtgattgttgcttcctgttattttgttgttagaggtggaattatgcttgtgtcttcttttgggtttgtagaaagtagattacattcttgctttttctagggcatagtttgcctccttgtgatgaagttttccatctattatcctttgtagggctggatttgtggaaagatgtataaatttcatcttgaaaaggaatatcttgatttctccatctatggtaattgagagctttgctgggcatagtagcttggtctttcattacagtctatatgacatctgctcaggctcttctggcttttatagtctctggtgagaagtctggtgtaattctgataggtctgcctttatatgctacttgacctttcccccttactgtttttaatattctttgttttgtgcatttggtgttttgattattatgtgacaggaggaatttcttttctggtccaaactatttggagttctgtaggcttctcgtatgttcataggcatctctttctttaggtaagggaatttttcttctattattttgttgaagataatttctagccttttaagctgggaatctttggtcttttctatacttattatccttatgtttcatcttctcattgtgttctggatttcctggatgttttgtgttaggagatttttgctttttgcattttctttaactgttgtgtcaatgttttcaatggtatcttctgcacctgtggttctcttttctatctcttgtattctgttggtgatgcttgcatctgtgtatcctgatctctttcctaggttttctatcttcagggttctctccctttgtgttttctttattgtttctttgcccatttttagatcgtggatggtcttgttcaattccttctcttgtttgattttgttttcctgaaattctttaagggatttatttgtttcctctataagggcttctacctgtttacttgtgttctcctgtattttttaagggagtttttaatgtccttcttaaagacttctatcatcatcataagaaattattttatatctgaatcctgcttttcctgtatgatggtgtattcaggacttgctttggtggaagaacaaggttctgatgatgccaaataaccttgttttctgttgcttatgttctttggcttgcctctcaccatctggttagtgctacatggcctcgatatacctgactagaccctgttcctcctgtgatcctggttttgtcagaattcctcagagtctaggtgtctctgtgatcctgttgtttctgtgatcctgtgatcctgagatgctgtgtgtgtcagagctcctgggagtcaagctgccattgggatcctgaaatcctggtctgaccaagctcctgagatcttatgatcctgagtgtgttacatggccttgggttgagcttcttctggatgttgtgggattgggtgcagagctagtgtgcaaggtcttctcagggcacaagctcagacagaaggctgatcttagaagcttcatctcaaaagccctggtggcttattaccaaacatacatgaatgaaacttctaaggatgcagtttttctttactggaatggccaccaggagcttgaccatgactatatgggtagcacaaattggactttttttcatttgtcttttgtttttgcttttcaattttttattagctattctcttatttacctttcaaatgctattccgaaagtcccctataccctccccctgtcctgctcccctacccacccactcctacttcctggccctggcgttcccctgtactggggcatataaagttttcataaccaaggggcctctcttcccaatgatggctgactaggccatcttctgctacatatgcagctagagacacgagctctggggggtactggttagttcatattgttgtcccacctatagggttgcagacaccttcaactacttcctctagctcctccattgggggctctgtgttccatccaatagatgactgtgagcatccacttctgtatttgccaggcactggcctagcctcacaagagacagctatatcagggtcctttcagcaaaatcatgctggcatatgccatagtgtctgtatttggtagctgattatgggatggatccccaagtggggcagtctctggatggtccatcctttcgtctcagctccaaactttgtctttgtaactcctcccatgggtattttgttccctattctaaggaggaatgaagtatccacacgttggtcttccttcttaattttcttgtgttttgcaaattgtatcttgtgtattctaagtttctgaactaaaattcacttatcagtgagtgcatatcaagtgagttcttttgtgattggattacctcactcaggatgatatcctccagatacatccatttgcccaagaatttcataaattcattgtttttaatagctgagtaatagcgccattgtgtaaatgtaccacattttttgtatccattcctctgttgaggggcatctgggttctttccagcctctggctattataaataaggctgctatgaacgtagtggagcatgtgttcttattaccagttggaacatcttctgggtatatgcccaggggaggtattgctggatcttcaggtagtattatgtccaattttctgaggaaatgccagactgatttccagagtggttgtataagcttgcaatcccaccaacaatggaggagtgttcctctttctccacatccttgccagcatctgctatcacctgaattactgatcttagccattctgactggtgtgaggtggaatctcagggttgttttgatttgcatttccctgatgattaaggatgttgaacatttttttcaagtgcttctcagcccttcagtattcctcatttgacaattctttgtttagctttgtacccatttttaaatggggttatttgaatttctgtagtccagcttcttgagctctttgtatatattggatattagttccctatctgatttaggattggtaaaaatcctttcccaatcttttgactttttttttttgtcttattgacagtatcttttgctttagagaagctttgcaattttatgaggtcccatttgtagaatctcgatcttgcagcacaagccattgctgttctgttcaggaatttttcccctgtgcccatatcttcgaggcttttccccacttcttcctctataaatttcagtgtctctggttttatgtggaggtctttgatccacttagacttgagctttgtagaaggagataagaatggatcaattcaccttcttctacatgataaccaccagttgtgccagcaccatttgttgaaaatgctctttttttccaatggatggttttagctccccttgtgaaatatcaagtgatcataggtgtctgggttcatttctgggtcttcaattctattccattgatcttcctgtcttttgctgtaccagtaccatgcagtttttatcacagttgctctgtaatacagcttgaggtcaggcatggagattccatcagaagtaatttttattgttgagaatagtttttgctattttctgctatcctaggttttttgttattccagatgaatttgcaaattgccctttcaaactcagtgaagaattgagttggaattttgtcttttgtttttactttctttattctttttcaccttctcctttattttagggtgtgggggagttctcaatggcagcaacagacctgggaagactaggaagtgagtgtacttggggttcctgatgtgaaattcctgagtaatcaataaaaatattattacaaattaataaaatattcaaaatataagctaatcaaatgcatacttcatttacgatggctgttagagatggtggtatggcattttctgtctctgctaaagaagagcaaatggccttgtgaaggactgacagcactcaattaagctacaagtctaacttccatatggcaggaatctgacatgccttgacaagggaaatcagaatttttgtctttttttggcaatattttagatacaccaaaccagctcaattcctatgacacttatcttcacaacttcacatttagtttgcaggaaaaatgaaattaattattcttaagcatatggtttgttcctttcccccacccctccttatttgattttgtagtgaatacatttttttctccaaggacatataaaagtcaaaatactagatctaaagtctctgaagtgtttctgctccaaaccgtgtctgtacagtctgagttctttcaagtagttagcttactggcttctgacacttctataaaaatatcccatagagcttttcttattacgttttcattgactctctccgagtgataaaatgaaattctgtaaagggctttgaaaaccatgcatattgctattcctccacatttcaaatactaatcaagtgtgactataaaagaaacaactggtgcagtgaaaattgctgcagcgggttgagactcaagccattattaattcattggaaactatttttttctgtaagattatggatcctacaaagtaccagataacacaattcctgagatcaaagtttttgtttcaatcacagggaacttgggtatctaatcttcccagcatgtgcatttctgggatagtacatcagctgctccagctgtgccctgagtgaataatgcagcatattttatagactttggaagtacctcttcttacacagtgcccataaatgatgggtttaaggacaaaaggagcctcagattaaaacaacaggtctagactagagagacatcctagcttcctacaaaagagtaaagtaaaatttcccttcctaggctaattcagcatgtatttgcctgaaaactacaaactagtagtgtgtgcagagtatttttatttgctttcccaccttcaagacaatcaggttggaatctgcagtctgagctatcactgtgtgacagttccatccatagaaataaggaggaaagtagaggccaaataaaactttgtcaactctgattttattcacacacacacacacacacacacacacacatggtatacatattatctatagtaaaatatatacctttatttaaaaataaactgatggattggactcacacttaccatgctaggtagggattgcttctatgtaagcactaacgctttcagagtgcaggaggagcaagcaagaccttttctaaactgcatttcccaccctgtacttctttccttgagacagggccttgctatgagatccaggctgactttaaacttatggtctttttgtcttaccactgcaagtcctagaactataaatatgtactatcccagtgactttccccccaaatgcttagatattagttaatgactctcctcctctttggtgaaagtagttgttgttgaattcagactaaaaattctaaattataaagtctcattaggacaaaagtgctagttgtttttttaatcttgtgtctctgggtacccagtcttgctcatcaggtgcaagagatggaaccttactgaagaaagattactgaactaaatagtcagtgtagataattagattttgttaagtggccaaacaggaactatgcaacagcagtggaatcgactacagtcagattcagagaaacgaactctggacagtattgtcagggccaattcctttctctaagaagccagcaaaagagcttcactgacctcttaggtgaccttctgtgggcccttaatttactctaatagcttggtgagtctcacctcatcttttagcaacatcctcattaactctgcatgttttgtctataaataagagtacagttctccgaatgcactgtgtgtggtatgagggtaaagttcagacctctgcagtcttagtggtgtctgttagatttaaactctccactcactcacagtgtgccattggcaatttgttaaactcttcctatttgttaaattgggtccatgtttggtactagtctataggctactttgaagagttcattggataaagcaggtgaaagttaatttaaccgtaacaaactccaattttttttcagtgctgcaaaaaactgctgactctgagttcatttcaaagaacacattatttcatgacaatacctctaagaagtcttgatattgtgggttattgaggcttagtctgcatttttttccaatgggaattctgtcctctggcgatttttatagctatggacagggagttcctgagttcaaagaagcattgctatgatagaattagctgatgatctgaccctgctgatttttactgtttaaccagttctagaaatgtttgcattaagcaggctttttgtttgtttgttttagttttagttttgtttgttttcagtttgtttgtttgtttacacaccagctccctagattgaattgcacatggcaagctgactgggaagtgctctcagggaaaataccaaaagtgaagaaacagaaacaggataggcagagggagaagagaagtcccgatataatcgccaaaaagacttcaggggaagcctcatggaatcctgtgatgggcatggctctttgaaggtgccctgagttggagcagtcttttagcatcatggatatagctgtcctggccagggactgtgactgtggatcaggaggcttcatttggcccagagcaaaatcattcgggataataggattactatttacttgggagggagactgtgttagtatgtgtgttactcattcgttcttgctaggattgtttctcgtgacttgtctaggtgcacagggatctgtttttctctttctgacttatgtgcccctctggaagctgaaatcttttcagaatgcataaatgttctttattaaatataccttatattttcttgattcatagtccctaatacaatttctttctttttaactcctcagtcatgctccttaaattatccttaatctttaaatgaaacctgccattactcatccttcataaattagactcctgaatcagtaagagaaacaggaagcagaaaataaaacatggtgccttgctttctaatctcagccctgctccaaacctaaaggtacagcgtttgcacaagctgtttcatctctctaatttttttt

SEQ ID NO: 833 - DNA, 2378 bp, Mus musculus
cgcagggagaacaaaaagagctttacccactgtctcctgcctattctcaagttcttccgctgcttgagctgtttgccctgggcttggctttcctgtgacctccctgcaccaggtagaaactgaagaccagctactgcagacaagtacctccccaccttagggctgtcctaccccgattggctcccatttcacattctgcctgtgtgggcaattatgagcaaagacagaacggtagacaattgacatctagaaaccacaaggtcttgtaaaagatcaggtctatataccaccgaagacacaacaatggctttatctctggaagaatttgtctactcccttgacctgaggaccctccccagggtcctagaaatccagtcaggcatctactttgaagggtctgtttatgagatgtttggcaatgaatgctgtctgtcaacaggagaagtgattaaaatcaccggtctcaaaattaagaagatgatggctgaaatttgtgagggcgctattggaggttgtgagtctcagaagccttttgagctgcccatgaattttccaggtctctttaaggtcatggctgataaaactccatacctgtcaattgaagaaatcacaagaaccgttaatattggacccagcagactaggtcatccttgcttttatcacctgaaggatataaaactagagaatctcattattaagcagggtgagccaatccggttcaactcagttgaagagattaatggagaaacgctggtgaattgtggtgtggtaaggaatcatcagagccactcatttactttgccattgtcacaagaaggagaattttatgagtgtgaggatgaacatatctataccctaaaagaaattgttgaatggaagattcccaagaacagaacacggacagtgaaacttacagatttctcgaataagtgggactcaaccaatccattcccagaagacttttatggtacactgattctcaaacctgtttatgaaatccaaggtgtgctgaaatttcaaaaggacatagtccggattctcccaagtttagacgttgaagtcaaagatattactgattcttatgatgctaactggtttcttcagttgctgtctacggacgacctttttgaaatgaccagcaaagagtttcctgtagtagctgaagttgtcgaaatatctcaagggaaccacctgccccaaagtattttgcagcgagagaaaaccattgtcatccacaaaaagtaccaggcttcgaggatcttagcttcagaaattcgcagcaatttccctaaaagacacttcttgatccctattagctacaaaggcaagttcaaaagaagaccacgggagttccccacggcctatgacctgcagatagctaagagcaggaaagaaactctccacgtggtggccaccaaagctttccatacacttcacaaggagctgtcccctgtgtctgttggagaccagtttctagtgcatcattcagagaccacagaagttgtctttgaggggacaagaaaagtaaacgttctgacctgtgaaaaagtcctcaataagacccgtgaagatgcacagcttcctctatacatggaaggaggttttgtagaggtgattcatgataagaaacagtatcagatttccgagctctgtacccagttttgctggcccttcaatgtgaaggtggctgtgagagatctctccattaaagatgacattttggcagctaccccaggacttcagttagaggaggacatcacagattcttatctacttatcagtgactttgcaaatcctgaggaatgttgggaaattcccatgagccgcttgaatatgactgttcgactagttaatggtagcagtttgcctgcagatgcagggctacttcaagtcaggagttttgtagaagagattacagaagaacagtattacatgatgaggaggtacgaaagttctctatcacatcccccacctcgccctcccaaacatccctcagctgaggaaatgaagctcaccttgctcagcttagcagaagagagaacaataaatctgcccaagtctctcaagagtcaccatgtagacagacccaagaagcttccctcagatgaaagtggccaggattcaagagctccagttggttttcagaatgatgtggctgatgtggagagacagaagagcaagcatgggccactgcagccgcaagcaccactgtgactacatgtcagttaaactataaaatattattttaaccatctacctgataaggctacaacacacagtttcttgcttccatgatatttggaatagagcatgtgtatagaaatcagaggtttggaatcttccttgggtctacccactttttttttttaagatatatc

SEQ ID NO: 834 - protein, 654 aa, Mus musculus
HLETTRSCKRSGTTEDTTMALSLEEFVYSLDLRTLPRVLEIQSGIYFEGSVYEMFGNECCLSTGEVIKITGLKIKKMMAEICEGAIGGCESQKPFELPMNFPGLFKVMADKTPYLSIEEITRTVNIGPSRLGHPCFYHLKDIKLENLIIKQGEPIRFNSVEEINGETLVNCGVVRNHQSHSFTLPLSQEGEFYECEDEHIYTLKEIVEWKIPKNRTRTVKLTDFSNKWDSTNPFPEDFYGTLILKPVYEIQGVLKFQKDIVRILPSLDVEVKDITDSYDANWFLQLLSTDDLFEMTSKEFPVVAEVVEISQGNHLPQSILQREKTIVIHKKYQASRILASEIRSNFPKRHFLIPISYKGKFKRRPREFPTAYDLQIAKSRKETLHVVATKAFHTLHKELSPVSVGDQFLVHHSETTEVVFEGTRKVNVLTCEKVLNKTREDAQLPLYMEGGFVEVIHDKKQYQISELCTQFCWPFNVKVAVRDLSIKDDILAATPGLQLEEDITDSYLLISDFANPEECWEIPMSRLNMTVRLVNGSSLPADAGLLQVRSFVEEITEEQYYMMRRYESSLSHPPPRPPKHPSAEEMKLTLLSLAEERTINLPKSLKSHHVDRPKKLPSDESGQDSRAPVGFQNDVADVERQKSKHGPLQPQAPL

SEQ ID NO: 835 - DNA, 108057 bp, Homo sapiens
aatgtctgagaaactaccacagctcccaggagcctagggagacataatggccaaaggcaatggggtatcctgaatgggatcctaaaaaggaaaaatgacgttagcaaaatctaataaaattttagtgaagtatgaagtttagctaataataataatatctcaatattggcttctacattgtgacaaatgcaccatcataatgtaaagtgttaaaataaaggaaacaggtgtttgtatgggtatacaggaaatctctgtactatctctgcaacttttctatgattctataacctattctcaaataattattttaaaaaattatggttgctgtattttataaactccatttcaaatgtacagtcatctaattatcttccctaaggcatggtgatagtagaaacagattctccatttcctggctctattcagagagctttattctggaaataacgttgtgggaatggataaaaatattcaattacttttgaatacttgctatcagaaaacaatacttacgtaatgagattgtaactgtttatagcaagaattttcttccctaataacaaattcttaaagataaatatgtaattcctaagaatgaaataaatacatcttctaagacaatgagcttacaaaatgatgaggcttgttgcaatgctctcagagtttaattggaaaaaagagacactgagaaggtagtctgaactatgactgtaattctttataaaaaaacatcatctataacaagccttttacttagtcttagctagtttatatatttaaaaaggaaattagatgcactagaaaataatgaaagctaaagctattatttttctataaagtgaatctataaatctcttctgttgctaccttttcaatccctttgagatttttttttactgagagtttctcaagagattaaattttgtgggtaagtgtaatagttcctgcccaggtttttctgttactggatctatgacttttccaactttgaaaattatctcaggcaaattgtgtatcattatcttagtttgtaaaataggagtacttttgagaaacaaaatgtcctcaaccatgtattgctgatgtatcaagtgaacaaagtaggttcttcaggtttttaaaacactgtggaaataagaatcctgaccaacctgcacccatcaccattctcctttgtgtgtgtatagttgttgttttatgtttatgtgtttgtttttgttgccatctctattacttttcccagtaattcatttgactgggactgttaaatatactgttaatattacaaagctttggttaccaagtgtattagtctgttctcatgctgctataaggatacccaggactagctaatttataaaggaaagaggtttaattgattcacagttccacagggctggggaagcctcaggaaacttacaatcatggtggaaggcaaagcaaacatgtccttcttcacatggcagtatgaaggagaatgagtgccaagtgaagggggaagctccttataaaaccatcagatctcgtgagaactcactcactatcatgagaacaggatgatgaaactgcccccatgattcaactgtctctacctggtcccactcttgacatgtgggtattattacaattcaaggtgagtcttaggtggggacacagaatcaaaccatatcaccgagtaacttccccgactcagtctagtggcaccaggtgaaaaaaagttatttgtaactcacagtttcatgtatacatttgtcaggttaagcaaatggtctgttgcccaataaactaacttgggttaaataaatacatatcctaagttgaatttactaaactagataatttgtatttaatgcatattttaatattttatttttgtaatatatatacttaatatattatttaatttttaggtctgaaatctaaaaggaaagttgattttttgtaagcaattggcaacttatcagtgcttaatttgtaatagataactattttaaatgttttaagctctacttttaataatacaggactgaattgtttctgtgaggctctaaaatgttagcacatcaaaacgcaaatggcatctttgagtttctctcagttataagagataacaaatgtgaaaaaaaaagagaaaagagaaaagagctgttaaagtgggcataccctttctacagacatattgcagttaagcttttcacaaatgctatataaaagtcagaggaaaatgttagagttacatcacaggacctccaccatttaaagggaagaactggaaaatctcttatgaatataagggcttcattttttatttcatggttctgaggaaaggttgagtcctacagcaagggaaaatgtcagggcataattcatacggtaacaccaacattcacattgcactttgcaagacatttcaacctgtgctcctgttctgtggcaccgagcagtaggcagaactgcgtgtaaaaaaatacgcagatcgactcagttgagtcaagtctcctcatggtgagcaggctcatctacttgactgctttttaccctttaagattaatctgaggaacactcttcctggggagaccccttcctaattcttgaagttcctgaactgtatacattggattgtgattcttaacttgtgggcatggtcagctaaaatgtaatgtctctaagggcttatattctcagtgccttgtataatgacaagcatagaggaagagttcagtggtttgctgaaaggacaattaaacattaatttagaaaaaaggatgatcaaaaaagaaacttacatgggaagaaacatgaatcctacattgagttttattcaaaaggaaactaaaagtgccgggaggcaggagcttctttgaaaaccaggtggtgatgaatgaacacattcataggcggttgcattttgcatgttgcattttgacaaaacaaattgttgtgtatagtaggattttattttctttcaaggttattaaaataattcatattcattcttataaattaagaatgaaaccccgtctttactaaaaatataaaaaattagctgggtgctgcaacagagcaagattccatctcaaaaaaataaaataaaataaaaagaagaatgtacatatggttggagacagaagagaatggtgatcaaggtatttcaaatggaagccatttatggcactgggaacatttttggtgggtgtactatgattttgtttatcacatacccattccttctcttttgggtaattagctcacttatttccctttgatatatctcctcttccaacactttttgtgatttagctgagacaactgcctaataaaatccaaagtagagcccgtgaacctgaaattatgggaaattagcatatttcattttctagtcataatgattggctgagacatatacatgtgagccaagtttgatcaatcacagtttatcctgggacttttccaggtataactaggagaaggtagtctcttccattgcacttgaatctatgagatacaaatcttgagctgccaggtgtcacacaacagcaggatatccctgaaatgtcgctcatgcaaaaaaaaaaaaaaaaaaaaaaaaaaaaatccgagcctaatgccctaatggtattgtatgattccccagagcaagcttattttgtaggtagaaatgctgtaaacctttcaatgacgaaccaataaatggcaccttttggttaatccaaaatcacaggagtgattcctataagcctaattttttcttctttagaaataaccaatgaaaagaaagtttcagagaatgaacgatttagataccagtcagaataatctctaagatttcttcgtttttgtttttttccgatactatctacttggagataagggtttattctttactcaaagaaatattacattgcactgaaatattataatatagttttaagcctctactgctgaagcttatttctctgcttgtgaatttttttttttgttttttaacattcagacagttctacttactttttaggaaagcagctatagagaatctaacaaacgaattggtattttacgtaaagtttgctttgagccatttttcttttctttttcttttcaacaatacttctcttgggatagaaatcattggcaataatgatactaactataatttaatcatcatttcatagccaagtccatctctgttctttagcagaaattttaaaaagatgtgttaagtagtagcaagactggtgtgaggacaatattttttttccaacaggaacttccctgtttgaattattagggtaatgtgaaatgcattttcttttcttttctcctcctttttttggtcattaaagtaataaatgcttcagttgatggtataaataaatctttgtgtgtatctgattatatctaaatgtgaaattgctacatcaaattgatttcaagatagatcacaacagtttgtaatatagatgagtgactaaacattgcaccattaacagtatgaattttatgaaataaatatttgctttttctgtcaggttggtttttactctgattccattcatttggtcaattttgctttagatattttgaaggtatattattgaaagctgtgaattttctttaagaattggtcaccctttcattattaaacaaataaccttattatcttttataatccttcttgtctttaaatctaattgatgtaatattgatgtagtttcatgagctttcttttgcttaatgtcttatggtatttattttcccattttttcatctttagactttctataaacttataactaaattgtatatttttaagtagatttatgtgtttaaatgttatctgccaacattagtttattacttgaactattaaactatttaatttttatttgtaaaaattatttcatttaaattatttaatttaaattacatttaaattatttcatttaattacatttaaattatttcatttaaatgtaattatttcatttaaattattttaagagtataattgagtttatgtataccatcataatgtttgctagcaattttgaggttctttttcttttctttctcgtcttttttggattaattaattttatcatcatttaccatttttagtggctttcctagaaattacatgtgtttttatttatttaactctgatattaaacatcacttttgcaacttctctagaaggctaatgctttagaacattttaacttcattatcagttttgcttttgcattactgctatattttacaatatattgcatgaactatatatagtgcagatatattcaaaactccacaagccattaattattgttttgggaactcaatatattcagttcactgacatattcaccctcttcattccttcctgtggtcttgactttctgtctgagatcattttactttcgcctgcagaacaccctttatagtatttcttttagtgagagtttactggtgatgaattttcttagtttttgtttgtctgaaaatgtctttattttgctgttgctttcatgcgtctctggatttagaatatcaagttggtagttggtttctttcagcattttaatgatggtattccattgtgttctacccttattggtttttgttagtaagtcagctatcatcttattggtgatcctttgaaagtgacaatttcttttcttcagagtgcatttaagatattctctttgactttggctttttaacgttttagtatgatgttccttagtgtgccttcttttgcatttatcctccttggtggtgttggcaaggcttgaatctatggattgatgcctttttcaactttggaaaatcttcagctattatctcttaaaatatttcttctcccactattatttctcctctcacgttgggactcagtttacatataagatctttccactatggctgaaatatctctctgcagagacacagagatagatagatagagagagagagagtgagagagaaagagagagagcagatatttcctacgctcccatttccagttcaacaatcctctcttactgtatgtcccatttgctgttaaaaccaattattgaatttttaatttcagttactgtattttttaactctagaattttcatccgatactttctatagatggcagttcttttctccttcttgtcttctagttttgaacatgtttatcaaaattatcttaaattgcaggactaataattccaatatcggaattaccccatgagtttgtttctgtggtctcccttctctctgtctttctctgtcctgtcttctggcattcccattcatttcatacttaattatagatgttgtatttttaaatattacagaagttctggctgcttttcctcaacaggaggatttacatttgcttctatctggcagcaagaataggggcagaccactttaatccaatgagggattgagctaattttagtctaagcttcagtttttgtaaagctagttctatttataggcaaccctttctcttaggaagcagccttcaggagccccaactgagaacacaggcatttgttgtgactcctgctccctccttggctggccctggcttcccagttctgcaagactgctgaaagcactccttggcttcttcagcttcctaccaaccatgctcttgtttgtgtctcatacaatcaaccctgtactgctttcaatgagcaaaaaaattttaaggggaaaaagtggtgctgagcaatacctttctctgacttttcctggaggaattgctacttcccaaagtccaatttattttggtctcttttgctatgtgaaactgccaaaaactcaactcaggttctctcctcctgagccaccagtttttgccttctcagactctctcttggtgccagttactaacccataaaagccttgagggaaaagaagtgcagaatatggagttcctctaatggttctgctctgctttacaggatcttggcctctcatgttctgcaccctgacagctctcttgtttcttaaaacagcttttttaaaaagtatacagctcttctaggtgcctttggtagaaaacgtggtcagatacaagctcatagccagaaatagaagtctttgaatatttttattttgcatattgactaacaagtggcctttacccacctaagccattgtttatttgaaggatgtgcttttttttttttctattttgttcaaactcctttttgatttacaggagtatttcataagttagttgtcaaatatattattagttttttccttcaattactactcagaaatagttattttcttacccttttccagacattttcctatttttcccctctggtttatttttatttaaatttaattttaaaatgtatctaactttaatttcattgcatggaaagttagggaaattttctccccaattatttaacaaccatttgttgaataaaacattctttcccactgccttggaatttcacctttttcaaatagtaaattattatatacagtctagttttttttttaaaattctcgttaatctattattacacctataacatgctgttctaatgaccaaacttcaataattcattttacttgatgattcaagtactcttgaactcattgctcttctttgtcaaccttaacttggctgctcacatcaggatttttttgcctgtgtgtcagaagtgattacgatctggtctaaagcagtagcagtggggatatagagcaaagacagagtgagtggtactgagtattgccatctatagggcctgatggatttaacggctagagaaaaaaaatggcatctcacatgattctaagccttccggcttgggaaactaagagaatagcagtgtcattaattaagactgagaatacgaagatgattatcacagagagagcgtcatctgtcgcgagagcagaagcagatggagcctaggtaattgtaagagattggtgatacgaaatggctgtttggctagtaggatagaaatttgacttgggaatattaaaaaaataagtgatatccagcttgcattagatatcaaatgaaatgtattgtggcatcagttctaacggattcataatttttaaggagcagtccacagaagcctctttcatgtattcatccacatgaaatacactactaggctgtaaactgtggggaggggtatggaaggcagacagatcaagggtaggacatttttggacaaaaaagttgccagtgaggaatttgaatctaatgatagtaaacctgttgatgtggtcaatcgtaaattctacttttataaagaaagaaatgaagctggactgattattgaaaatgtcaaataggattacaaagagttgaaacagttttataagctccatatcaaaactaggcagtttttatctttctaggtcatttacatgatggccatggtagaactgagatgtcccctgaccctctgtatgtggctatgctctctgcagcctaaggccaaaacagttaatagataagtgcctgggtttggttactaaagaaaacgtgtagattcctgtcatctttcaagtgtatacataccaaccagtattctttattttttttttttttttttttttgagacagagtcttgctgtgtcattcagcctggaatgcagtggcatgttcacaactcactgtagcctcaaactccagggctcaagtgatcctccttcctcagcctcctcacagctgggactacaggcatgtgccaccatgcctggctaattttttaatttttttgtagagacaaagtctcactatgttgcccaggctggttttgaattcttgggctcaagcaattctcctacctcagcctcctaaagtgctgggactacaggtatgagccaccgtacccagcctcaaccaatattcttctactttaccttaaagagacttaggaactaccacctttaattgtatatattttaaatattgtttcagttacatgcaaaaaatagagaggggcaggattttgaagagatcaatgttcatgagttttctcctgcttcctttggtgctgatcatttcccctcctaaatttcaacaataagatcagaattgtggaattgtgaacttggaagaaattataaaatttattggactcttctacttcatctccatttagtaaataaaacaaatgaaaatcagagaagacaaggctgacgttagcctgtaaatcaaaagcagaactaaacccagaaaatgcaggtttcctgacaagtaattttaatactttctactatagtgtagagattagaaaactcattttaatgtactttgttaatttactgtatcattttgcatattctatccctaccctaccctcctttaagattcagcaaaatttttaatgtggaagaataaaaagtggtttcaatactctctccagagtatagtatcagaattctaaaaagagctgacgcaaagcacttttattaccaattttaatgtaaaggcactgacagtatgcaaataaggcacaaagccaagctttagaaatgaactagagagataatgaattcacatggtgccatttttaagattagactttagtcctatattcctgttctttgttggtgggcaagccacaagcaactctgacctcagttttgctaccatagtagatgcacacctggattaacaaaggacagaatgcgctacttagcacgtctcattttttgggcagtgtctgttcaccccacccccatcctgttcaacttcaatgtcagaaggaaatgaagccacaatgtgaacaaaaagagctataacattttttgtctcctgcttcccccctccctcttcattgtcctccccacatagagctactccaccccactctggctgtagtgtgacattcctgcctgcctgaggaagaaatggtgagcaggggctgcaattgcagacaagtgtcacccagaagccacaagtttctgtgagcaccaggtctacaaactacccaaggcatagcaatggcattatcactggaagaattcgtccactcccttgacctcaggaccctacccagggttctagaaatccaggcaggcatctatcttgaaggtaagcactctccaatacctttactggctagaacattcttgtaaagtatacatttttgaaaattggagggggggaattttaacagcaaatatgtgagttctggtaaaggaaaggcgatcacaaaagaaagtaatgaactgaccaacgaatcgtcaaaagccaatggtgttggagaggggagaaactagacaggactctgggacagacagaaataaggaattgagtgaagcttcttgagctttctgtaggccttgaatggtgaactatttctgcctttgctttgaaattggttgtaatcaagaataataaatttagttatcaatatttatgtttccacaatataaaaaataaaatttagcttgctaaaacaaaagcaactatcaaaggcacagtgtttagaaagaagtatttccaaatatttcccaaacttttagctcctaaatgttgcttataccaatgtttttctcactctgtagtggcctaactccaaattccttaaataatgaaaattttaatttgaaggtatagaaattattgctacaagataatttttaaaaattgatgttgaaactcagagttcaattaaacttattgaataataagatagtgagttttggtgtaactcactatgttaattcaggtgaaagaacattataacctccaatatacaacctagaatctttacatggttagtttgaatacatagaatacaattaataattctgtaggtgtatttctggcctcaagagtggtagaattgaagcagttgtagaaacagatcaagacaaaactaccaggaaaataacttaactgttggtaggcaggtctttcttgttcgtagacaaaataatgtattacatattatgttgcaaagtaaaagaaagattaacacgtcagctccagtttttatatatattatatatatatatatataaaatatacacacacatacttgcaggtgatgaattgatatgggctgttatcagcttagtgtacagttttatttaactaatttgtaagttgatttttggaatcagactatgttttgccgtgtataatcatattatcaatgtctctatttctaagccagccccaaatcattttttgtctcatggtttgtgttttttaggctttacgtaaaaagtctttctttatgtctactttaaaaagatattttcctatgttgtttttatcaactttacggtttcatattttgcatttagtttttagtctatttggaggacaatgttatgaattgtacagggatccaattttagttttctctatacagttcacctgatttccaggtaccatttgctaagctgacaatctttccgccattgatttttgttgcctccttcaaatcatattatatgttcacctctgtatcagtctgtctctaaaatatctcttctattccattagtttattttttttcttagctgcccccaaacacactatttttgtaactatggccttgcaatacatgttaatatagaaatgatgtatagaccaatcccttgttttcaatccttttttcctaaattggcttagatattcatagactttaaaaatgtttttatagatacataatatatatacatatttatgggatacatgtgatattttgatacagtgtgtaataatcaagtcagagtaatggggatattattcattgcctcaaacttttaccatttcttcatgttaggaacattccaattccactactctagttgttttgaaatatacagtaaattatttttagctatagtcaccctattgtactaccaaacactagatcttattccttttaactgtgtttctgtacccattaatcaaccaacccctctctatccccctcccactacccttcccagcacctggtagccatcattctactctctatctccatgatatcaatttttttagctcccacaaattaatgagaacatgtgatatttgtctttctgtgcctggcttatttcacttaacctaatgtccttcagttctatccatgttgttgcaaatgacaggatttcattcttttttatggctgaataatattccacattttatttgtctattcatctgttgatggacatttaagttgatttcatattttggctattgtaaaaacatgtgaatgcaggtatctgtaatatattgatatcttttcttttgaatatatatccagcagtgggattactaggttgtaagtagttctatttttgtgtgtgtgtgtgtgtgaaaacttcacactgtttctcatagtgactgtactgatacacattcccatcgagtataaacgttcccttttctccacatcctctcaaacatccattattttttatctttttgataaaagctattttaactgaagtgagataatatctcataactttttcaatgagtttttattaaatcaattgattctataagaaatctaactgggatttttattggatttattgatttggtagattaagttggaaagaattgacattctatattgttttaagaaagaatgtagtatgtccctctatgtgtccagaccatcttcttcataccttattattttactactatgttttacttcaattaagagggaaaaaactaaataccttgatcattttcacagtgtaaacacattcatgtaactgccaccctggtccagaaatagaaaattccaagtattccagaagccctatcctgtgctctttctcagtcattatatactatctccctcaagtgtaaccactatcatgacttttgtccatttatgacccttacataaatggaaaattacagtatgtattcttttctggttggtatatctgtttaacattatatttgtgaaactaatccatgctgttttatatatagttcattcattttcagtgtatgttattccattagatgaatatactacaatttatgtattaattctactgccaataggcatttggattatttctggcttggagtttccagtaattttgtcatgaaaattcttgtacatgtgtgcctacgtgtatatgcattaagtagggcataaaagtaagtaggattactatgtcatattgtgtgtgtacattcacccttggaagctaatgaaaagcaagtttcttaagtaacccaatttactttcctacaagcagtatatttgtgttccaattaactcatatgcttagtaacacgatattatcagtcttcttaattttagtcattctggcaagagtatagtggtagctcatggttttagttttcatctccttgatgactaataagattgagcaccttttcatatatttcttggatttttggaaatactcttttttgcagaggtggtttatatttcttgctcatttttctgttgaattttatacatttttgttattgatttgatggagtttatgtgtatatatatatttgggatatttactctttgtcaattttctgtgttgcaaattactttcttagtctatagtttcatattttattttcaaaattgtgtcttttaatggacgaaagttttccactttcgtgttagtgtagtcagtttatattttcctttttctgtgttgtcaacaatttttttctttaccctaagttcatgaaaatatgtattatcttctagaaatcctattgtttaccctcaccttcagatctgtagtctatctgggtttatgtttttgtatatggtttgaagttgagagcaatatttatttttctcttctacagagtcaattggtgcagtgacatttattgaaaagctgccttttctctatcatcttactctgttaaccttactcagaaatagtgtccatacatgcctgggtcttttcccttttatgctgttctattcatctacttgctatccttacatcaatttttcctgtcttaaataatgtggatatgcaatatctaatatatactttctattagattatatttaataatatgctacagagccatggttctcaaacttggttgtgaaataaaaatacctggattgattttaaaatataaatgcctaggtttctcctcaagaggtaaagatttaattatgtaaaaggtaaggcatcaccatcagtttttgaaaatcttcctgatgattataacacacagccaaatttgataactactgctttagaacaagttctctcaatttattattcctctttaagtttagcactttgaattttcacatacattttagaattaacttatcaacttcctcaaaagtcctcctggaattttgattagctgtgctttggtttggagaaaattggcatcattttaaattaagtcttctgacccactaatctggtatagctctttagttatttaagtctatttcatttctgtcaataacattttataattttttgtacagatcttgtattttttcagatttattcttagttatttgattttttcatgccattttaaatggtatttttaaaatcattttctctttgttgtacttattgaattttaagaatatatctttaacattttgtatatgttatgtgtacatttgcattgtctgtgaatattgatggattttgcttctactataatactgaatagaggtaatgataaaaaaaagatctctgtatttcattcatgaccactgagagcaattttcagtaatccaccattcatgatgtttgttttaggttaaattagttctagttttctaacaggttttaaaaacttgaatatatatttgacatttatcaaatattctttttgtaacttttatgataattacatagttttttttacattaaaaagtgttaaacatgcttttaattgtggaacacaaccaatggggtcatatttcactgaatttggcttactatttttttttgttagaatgtttgtatctcttttagggaataatattggcttatagtttttatttttttgtaatatcctagccaggctttattatcaagttagttgaacttacggaacttcttggttggagtcttttgttattttcctaaagattttatgtaactttggtgttatcgcttatttaaatatttagtagaattttcaatgaaggcctcctgagctgagatttctaatatagaaatgttttaaattatgacttcaattttttaatagtaaagtctttttatccatgagcatagtttatctctcatttaaacaagagaataaaatatcttctacataatttatcacagtttaaaaaagtgtctctatagagttcttatgtatcctaggctagttcctagaatgcacacacacatacttatatcatgtgtatatatatattgctatattgagatcgtattttgtctgttttcccattgattgtctctgaagtgaagaaatgcagttaaatacgattagtaatatttataaattcccttgttaattctaatagtttatattttttatttcactggttttcttaaatagacattaatgtcagaaacatcaagttgtgtctctttcttaccacaaatgttttttcttacctttttattacaggctagagccttcagtattatatcaagcaatagtggaaatccttgtcttattcctagtcataaagaaaatcatctaaagttccttgttaatatattatgtactaaattttggtgtttaacctttactcaactaaggaagttcccaactattctttgctttctaggagttttccgaataaataggtattgagcttattaagataataatgtgatttactttctttagtgtgtttatgtgagttaactttaaagatttttcaaatgttggaggatcctttcatataaatatatgtattatatatacatttttttcatataaatatatatattcatataaatatatgtattttcaaaaagtatatactttttgaaatacaatgtaggaatttgatattatatttaggatttttacatttaatcataattaaaatgagcccatagacttattcattttagatttaagataacattagcttccgaaaatgagttacataaattttgctatttctgttttctgagataattttctaaaagtaggtttaacatcttcttaaaaatttgttagagtgctcctggatgacctactaaacatggaatttttttgaaaagaagctagaatttggttttgttaatattctctatgttttgtttcttttattttttctgattcagtctcgtttattttcttgtttgtctgttttctctcttgctacttttccagcctcctatgttgaatcggcagccatgtttaatactttgcttcttgataaatgtgttttaaactattatttttttctaagtatttttaactgtttcctataacttttgccatgtagcattttcattattcctcagatctaattataatgtatttctttttaaatccagtagctattaattttgtttatttagtgatcatataagattttatttgctatccttttgcttttaattaataatttcattgtattttgttcgagattgatagtctttatttggaattggttgtggtttcctttactttgtggtatgaaacatgttctactttggaaatgcttcctgtgtgctaaaaaaaagtatgctttgttttttgttataacacctctctttatatgccaaatagcttgagtttttatttgttttgttcaaattatttctctcactgcttatttttcatatgcttaatctctcatttactttatctgttgtacatctatctggttcactcttcatttctgtcttttatttcatcaaaatttttttgaggttcagttgttccatgtgcctatgttagagagttacatctttttactgtattattatcctttttccttgatgattttttttctttaggttctatttttttagaaaatgttactattccagctttcttttggtatatcattttctaagcatttgtttccaatattttggggttctattttttgttttatgtggaaggaaacatattctttgtcctctttctgccttttgtctcagttcaggcagtggagccagattccacccgtcctgtggtgatgatgactctgtgacaaattttgggggatgggaggtttaaggaaatttgaaagaggctgatgtcaaatcatgtgaggttctgtagtattggattgaatactcgccgttgacaaccacagtgataatagggagaatgttcatcacaagaacatgttgctcaagcatttattattttaggagccgtatcgatgtgaagcgtttatgccctattgatgtgaagcacagaattgtgggttataaactcaggactctgcctcttggataagttataaatgagaggtgattccatggtcaacttaaaacattgaacatttgtcctttgttacaaaaaataggttttatcacaaccttgaggtatgatgtgaagattaattgagctatggcatataaagaatttagcaaaatgactggctgagatcaatctttcagtaaatcataactattattattattaccttaatgctggtatattgtaaagaaactggtcaattatttcaaaaattaaaacaaaactgatttgaatttttctactgttacatataccaacataaattgaatatgaagaaaaatagtaaaaagtaaaacattaacaataaaaccatttaaagaaaccacataaaaatgtgaaactgaaactttacaaagtgaaaaaattaaatttataaaataaaaagcttccttattccaaaaaaacccaaactacataaatgtggaagaaagactaactctacacaaggggaatatttacataatatagagcaaacagactataaatatcctgaatgtataaggaattactaaataacaataaacaaaagtgaatataaagatgtaaaaggcagttcacataccatactaatattaaaaaattcaaatctactatcaacaatgctaatgaaacaataaatcattatttctctttcaggtcactggtattaaaagattcacaaaagttattgtaggcatgaatgtgtggaaaggagccgaggcacacttggtaatgtgtaaacggttacagactttcgaggttgcaactgggtaatatttatctacagagaaaaatgtttataaacatccaatcactagaaattaattttaaaatacaattacaaaaagcaaaataatgattatattagaatgctcatagaagcatgttttatagaaaaatgttaagcgagcctagaatggaatagcttacatacatcctaataatgcattatcaggcattgtcaaagggtctagaattacagttgggaaaaaaagtaaagccctcccctcttggagcttatattctagtaaatgggacaaatgacaaacctagatttagaatatatacaagtgtcatgaagcactgactggagagtaaagcaaggtgaggtgaaaggtgatcttttgatagggtgaccggggcagattatctctgatgaaatttgagcagggacctgaataaactgaggaaataagccttgcccacatctggaagaacatccctgctgaggacagaacaagtgcaaactactgaagagcttgcttggtctggataagaaacagggagcagcccagtggtgctgaaggcaaggaattgggggaaggatggtgggagaaagactgaggcgtgggcaggcccagaccttgtaggccttgaaggccagagtgacactgaatgtggtacagagtggggctgggaaacccgtaggacctgtaaactaatgtggtcagggaaggccactctgaagaaatgattttggagcagagacttgaatattgagaaggaatcagccaaggaaagatctaggttctggagtgttccagagtgaacagacagtgcagacatctggggaccaaaaggagctttgtctgtttgaggaagagaaaacatatccctgtaccttgagcacatataaagcagggagaagaacatatgagaagaggtttaaggagtgggcaagagcatttcaaggagtttgggttttatgagacgccaatgaccagtttgagcagcagactgacaagacctgattgccatttgaggaagatcactggctattttggggagaacaggcattagtgaggcaaaagtggaatgatatattaggagactgcaataatctagaggagagttgatggtgccttgatttagtgtgaagagaaaggaacagttcaagagatgctttggaggtagaaatgtcaggactttctttttctttgtttctttctttttttttttttttttgttgagctggagtctctttctgtcacccagactggaatgtagtggcgcaatctcagctcactgcaacctccacctcccggattcaagcgattttcctgtctcagtctcacgagtagctgggactacaggtgcccgccaccaggcctggttaattattttttcgcatttttagtagggacaggatttcaccatattgatcaggctggtcttgaactcctgacctcaggtgatccatctgccttggcctcccaaactgctgggattacaggtgtgagccaccgcgcctggccgaaatgtaaggactttctaatggatttgaaattgaggtgagaaaatgaaaagactaaaggatgaattcaagattttggcctaaaccactgggtaaatgtttgtgtatttgacagagtcatgaagaccaggggaagatgagattttagtgagaaaaacaaaagttttgttttggacatattaaatataaatatctattactcagccaagtggatatttcaagttaggcaattaaaaatccaacttgggcacagaggatgcttgtggttggaatgccctatccattacctaattgatcaggactttatttgatcaaaaacctcatcaatttaaaaaaagaggatgccgctttccatacatgtatttctctattgatatttatattccttccaaagcatacataataataaaattataaaaaagaaagataaaattgataatatacaattttaatttttgttaataatatacactatttttctcacaaaagctgttaattctattgtaacaactagctagtttttaaattaatatataataattgtacatatttatggggtacatgtaatattttgattcatacatacagcgtgatcaagttagagtaattaggatactgttcacctcaaacattgatcatttctttgttttgggactattccaaattttttcttccagttattttgaaatagacaataagttattattcactatgatcaccctactgtgctattgaacactaggctttattccttctagctaactgtatttctgtatccattaaccaatctcacttcacccccttctccccgctaccctttctagcctctggtaaccaccattctactctcttccctccatgagatcaatatttttagctaccacatatgaatgagaataaaacatattaactatcaatctatttttagcagaagtcatgttactgaaaattattgaaaatactacatgtttttattactgaatactgttttggaaaatgctgattatcatgtgacccagtgattcgaatggttctaattaatttattttagtgcttgttttgaatgacagctattgaagatacctcatcaaggtccaatatacattgtatgtaatctactcatacagcaggtttatcattaatatttgtggctatcactctgtgaaataatcttcataaatttcatgttgtgaaataatcttcctaaatctgattttggcagtttcattagatagcagttgtacgcagacaatgacaagattgtgctaatagaagacgtgtcactctatcattttcttcttgatagggcctgcaatctttaattctcaaatgtctgtgttggcatcttgtgacgttatgtctattttgtgagagtgagtatagatagaattagattataacaattcttaaatcaacttaacttcacctgcattatgttgtagtatattgaaagtaaatgaatgaattaaaacaattcctttaactcattttttgaaattcccaatctatcttagtatgtgacttaccatacatgtcatatgactatccgatgcagagataaattaggatttttaatattaaatactagcaaccttgaaattaactaatataactctttctgttaaatattagtatagtttagttttcttatttgttttatgtggaaatgaatacgaagttctactattttccactttaacctcatatcttgtaatactctttggaatatgtggcccaatttagagatccctgcaaggagctaacacaattgatgttatgagtccctctcagattaaagctgtggataattatgtatgacatatgccatagataaattgacttgtgctatcttgtcctcttcagttctttaagtgagcagtttataaccaaagaacaaatctgaggaaaaaaatggtgttcatctattccacttttccacctcttttgagtacatggtatgcttgtacttcccaacccttttgtggtcacatgatcacatgacttgtattggcaaatgtactgagaacaaaaataatatgtataatttggaacagatactttaagaaccagttcataattaaacatatttcatcatggtagactatgtcaaaatgaaatcttcaatagcctatgttgctaagtgactataattagcagagaacatgtcctcatccacctgtacctgacatgtagtgaaataagaaatatgctttattgtttaatctctgagattttgaagttgttatcttaatataagctacacttctctcactgatacaataaattatttttattatgactggaactgaagttattatcaacttcaaaaaattcaaaaccaggcatattctaaagagagtcatataatgtcagggaagttacttgggtaataatgctaccacatgttcataagaaagtgattttatcactctattcaggaagcatctgttgcttctttaactactcttcatattgctaacattaccatttacccctgttgactttgtatatgtagccattttggtgttgatttaaaaatttggcaaaaaacaaaattggtttgcattatgatctcttttgaagagctggatattaatttttttttgctttagaaaaacacatgtgcatggttggtaattttataaatgcagaaatgcataattacccataatgccaccaaacagagagaaatatggttaacattttgatgtattctgttataatttttataaaaatatgaattaactttcaagaaaagaaaattgatgcccaaattccttttccccatgctttatagggaaccccataatttcccacaacttccatttatccccttagttcaagccatcataatttactgctaagattatcaaaatctcctaaatgctcttccttctttcatttctaaaatctattctcaacatagcatctagaatcatggatgtcagattatgtcactcctctgttaaaaaccctccattttttctcaaaataaaaatcttatatgggtaataagtccccacattgtctccatgttgcattatttatctgagtttattgcttattaatctgcttctcctcctagccatactagccacttcactgttcctcaaatttggggatattctcctgccttaaagctttgttcacacttttcatctggaaaactcttcttcaggacatcgacttgactaactcccttctctacgaggtttaccccagctgcctctttattcttgcaatttttctactcccctttccctggattccctgtcttccatattccggtcttcattttcctctgtactgaagcacctagctctttcttacgtataagttaggtatagcatgtttttatgtcctctcttattagatttttcttacagttttatcaaggtataatttatataccataaaattcaaccactataagtatacaactgaatggttttaagtaaattgatagagttgtataatcatcatcgatttaagaccattttcatcatcttaaagaattagcctgggttctttgccattaatctctatgggcatttctagccctaggcaacaactgatctgctttctgtctataaatttgccttctatagacatttcatataaagtaagtcatacaatatgcagtcttttttatctggcttctctcacttagtatgtgtttgtggttcatctatattgtagcatacatcagtattttgttcctttttattggtaaatagtattttattgtatggatataccacatttcgtttaacaccagttgatggacactcagattgtttcatgattgcaagtattatgaataatatgtcattttacatttttaccattaatgtataaggatcccagtttcttaacatccacgctaagacttggtattttctccctttatagccagtggtatctcattgtagttttaatttgcatttccttaatgacaactaatgttgagtactttttcttatgcttattagcagtttatttgtcctctttgatcacatgtctcttcaaatcattcacccatttttaattgtgttgtcttccttttactgagttataagaattctttttttattctggatatttgatttgcaaatatattagatatacaatttgtacatattttctttcctttgtggcttgtggtttcattttgtttatgttgcctttgaagcaaaaagttttacattttgatgaaatccaatgtattttttggggggggaggtaggggagggctcatgcttttggtatcatgttacctaacctgagagcacaaaacttttctccactgtttttctgttgggggtccccaagatgaccctcactaattctctagaagaactcgaactacataagctattatactcatggttatgatttattccagagaaaagatagtcagcaaaggaaaacagcagtatagggcagagttcaggagaaaccaaacatgagctgtcagttatcctctcccagtggagacatatggacagtgcttaaatctcttaacaatgatgcgtgacaacatttacaaagtagtttcaaccagagaagttcatctatactttcatgtccgaggtttttttgtgtggaaagcctcataaacatggagtgcccatgggactgacctcagctactcagtctccagcccctacaaatgtcagacttatacagtgtggtccaggaccccaagtgaacaaaaacaggaatttaccagaagtcatgttgttagcataaactttctggtatggcccaatgttccagatacacaaaaacacttttatgcttcaaggactgtcaagagctaattctttctttggaatatatgagggttgagtactccaagtccatggaattaaccctttgctgcatggttttattttgggagagttttctctcttatctttgggtctataatccattttgagttagcctgaattttcttgatttgtaaatccaactaatggaaaaactaaacctaactatgaatccatttacaaagcatgctgggaatgactcaggtagaaaaggctgtctctacttgggagaagtgagggagttaaccaaagaaatgtctgggtgaatggtgtttcaagttgagggaaacctctttaccaaaatgttatggtaggaaggtgttgggatgttataggaaaagtgagaaaccaatgagcctggaaggagggggagagtgatcagaaacgatatgagagacaaaatggtggagaaccacatatggctcttttggacattgcaatgtccaatggggaaactgtagataccaaagtaaatcagccaaaaccacctaatctagtggtagaacttttttcttaactatgaatttagagagcatgagccactaatttttaccatttatcaaaaagaaaaatgttgatgaagccacacacacatttgtaaaagtcaaagcatagttgtgtttaactcagcccaaaagtatgatgctcaaaagtgtttcttgtaacaatttgtaaatgccaagaagttgtcattcccttcttcagagttaagatttttaagtactgtattttggatgtattaaatattatactatttcttgttcctgcaaaaaatatgttaaaatcatggaaattattccctagtattgtttatctatctcccttcatttcttccttttctttcttcttctttccttctttagtttcttctagaaaatgaataaagtatgacctttacccttaaaaattccaaagactagtaaaagtagatagttttttttattttttatcagtatttataatacaatgtgaaaggtgctctgtcataaactgtttgagaacactggggagagtataactcaccactcagaaaagtcagagaaagcttaacaagaagtagtaataattttgctaggacttgaagcccaaatagaagataacctggtaactaagaaactttcagaatgagagaaaattgtttagaaggttatgcaagttttaaagctcaaaagggggttcagaaacttctcagggaatagtagaaaatcaggtcatttgtggtcatattttaaatggcttttgaataataatgaggattttgaatttctaatcaataggcaactacaaaaatacattatttttataatatgtgttatggactgaatgtattctcccccactccaatttatatgttgaaaccctagtgtgactgcattagaagatggggcctctaaggaagtgattaggttaaaggaggtaacacaggtgaggccctgatctgataggattagggtccttataagaagagatacagaaagctctctgtaaacatgcacacatgcgtgtgtgcacacatacacacatgcaatgaagaaaggccatgtgaggccaggtgagcacagagagaaggcgtcagtatgcatgccaagaagagaggcctcaccagaaactgaatcaaccagaaccttgatcttgaacttctggtctacagaattatgagaaaataaattcctattatttaaactacccagtctatggtattttgttacggcagtacgaggcaaaaagtcatctcagatgagtatattagacatccattgtagtagacatttactagaagtgtatgagaaagagataacagcaaggggttaatagcagctgtgcagacagaaaccatgttccttttgggtagaatattctgaacttgacagcttatgaaaggcagtgagcaagagggggagttgaagagtctagactagtagtatggtagatgataaaaacattaattgaaagagtaactaaaagagggggtgcctaattcagttatattccaatgagtttgaggcctttataggacattcacatgcaaatgaacattagatagctgaaaatgcacatctaaagcaaaaggaatggtagagttgtcagggctgacattatggatttgcaaatgagtgaaagaaatcttgtggttttaaggattgtcctattgtccatgtgccacatgggaagaaatacttgggtcccaaagaacaccaacatgggaagtatggacaaagtgcagcctgtaaagcaaaacaaacaaaccaaacaactagtctccatgttggaagagaagcagcagagtgtagggtagtttgttgatgaaaagaaatggcatagagcaccagattgagagaatgtcaggaataaatgtttggttttgtcaggtgatttgtagtagggtattaatgattattaaaactgtacctattgaaggcttgctatggaccgggcagtgtgccatgttctttttttatataaatttgggtgtgtaagcacatataatatatatataacacagatgctcctcaatttgtgatggtgttgtgtcctgtaactgtaaactgaaaatatcataaatcaaaactgcatttaacacacctaacctactaaacattataacgtagcctagcctaccttaaatgtgctcagaaccctcacattagcctacagttgggcaaaataattgagcacaaatcttattttataataaaatgttgaatatctcatgtaacacattgatactgtactgaaaatgaaaaacagaatggctgtattgagtacttgaagtatggtttctactgaataggtactactttcacatcatcataaagtcaaaaaattgctaagtcaaaccaagtatgggagtctgtatatatattttatatgtgtatgtctatacataaatatgtgaatctatataatgcaacatatgtaattaaataatttgtatgtttggctacatgtaaatttagtgttcatatgtatatatatacacatatatatttacttttatttaaattagttaatttattatatttataaagatatttagcccttgaagatctcttgtgagattattaatattatttgcatttttttagggtctcctgtttgtcatatcaccaacctctgctatagggataaaacttacagtaaactttattattgctctgctctactgaagagtttaaatgagaaatcttataggaaatgctatcatcatagaaccaacaatgtcttgtaagatattttatgacaatttattgatggcattttggctacacaaatttagttgttgaagtaaacatgcataagaaatcactagtagtaactacgtttgtcttgtcttttaataacattactaattgcaatttgataaatatgacattgaaaaattaactctacaactgattgaataagtatgttgaataatgatgcttagtgaattatgtattatatgaacatgactcttatggatctgatgcatctgagagttcatacagcaaaaatcatgcctactttaatgcccatataattattttatggctaaatgaatttaattttttcgggctcaaataaaccaagcagtgatgtggtagtaaaatcagggcaaatttgaaaatcacagtattgtattctactcgcatgtattcatatttcacaggttttaaatacttagacaaaacaaaagcttttttttaagttcttaaaatttacaacatttatattttttcattagactcaagtggaatgaaattaaagtctaatgaaatatggcctatcacatttaaaaaaaataatttcaactaaatggaaagagagcaccagtatttttctacatgagcttgtatttgtaaagattcattgaagacaaacattacgtttctaaagtagaatttttttacatgtttacatgtagataggcaggacaacctaaactcacacatgttggaaactgtaaactttctatatctaagcttgtaaagtatgtaaaatttattatatcctgaaacttaaaacatttaaataagtttaaattttctctatttgtgtcaattttatatggttgggcactaaaatgactgtcagaatagaatctggaaaccttaaatgttcaatttcacattagcctacagttgggcaaaataattgagcacaaatcttattttataataaaatgttgaatatctcatgtaacacattgatactgtactgaaaatgaaaaacagaatggctgtattgggtacttgaagtatggtttctactgaataggtactactttcacatcatcataaagttaaaaaattgctaagtcaaaccaagtatgggagtctatgcaaagatagtaattttagctacatacttaaaaagataatcttgtttgaagagttttttttttctttaaaaacttggagaccattttttttttttttttgctgtataagatgacacttcagctactatataacttgtctactggaatgccttcaaggaatatatagtagaagtcaataaaaagttaaccttttagtgtagccattatatttttaaaaataaagataaaaatgtgaagtttaagaatgtaaatttgaagtttaaaagtttagtgcatttttgtatatgtgcttgaatggaacacatttctccctaaaatttagcttaagcttaagcaggccttattgtagaaaaaagccctaaaacaggtgcattaaaaacaagcaaataaacttagataaaagcaatgccagttgtattattttcaaaagctgtagaggaaaataactgccagaaaactttttgtgttatttacttaagtgaagatgtgccaaaatgtggacatttttgtacaatggagtatgagatttacatttataatagagtgttcatacttaaagataactaagttctttgttgttaagtaccaattttgactatgcaatacaaagttacaaaatggagtactggcaaatgttttttcctataatcctataaatatagattatgtatgtacttccttcattttgtaagtataaacaagtaatgagcaagagattaagtaaaattttattttttattatctgctagattttcaaattctgtgaaatgaaaattttggttaaagatattaattggctaaattcatttttaacaagtacaaattattggtcaattatttaactttaaaacattcactaaagaaaaataaaaagcaagacttactttaagattagtagttttatggttttgtatattatgatactggtagattttgttaggcactgctaaatgaccagtgaataagtgttgagatgggaaagaaagtgacttcaagttagtgtgcaaaaaaagatgataaaacttggattttagaaatgtctgctttgatgcaatagtcaagttcttgaatttaaaaactttacattttacttggaacatctaatttgtttcacactcaataaatacttggaatcatcgcgtcttttaaaactaagattttaacaaaagttgtgaaatgaaatgtctttaaatgaaatactttttcacaggaaataaaactttttacatggaaatggtcagtcattacttaaaaatacttttttgttgttattttaaaaataacttattaggacaagttttttgggaggcaattttcagctactctacataaacagattagctgtctgattttctggttcttacaaaaaatagataggactcaagaggttttttgtctacattagaagggttggttttagtgattcagcatttatgtcagttaaggaaagaacacctgccccataaacaatgtgtgaattctaaccttctaaccacagaccaaagtgcttttttttttttttttttaatttgtcttttggcatcaggaaaagcttaaaacatattcaaaaaagttttttttttttcctcaggactcctgaaatcaaatcatgtgagttcagaaataactgttcattagcagaaaccaccctgatttttaaaatgactaacagttgtcctaacccatctatctaaacacagcatatatatttattccagtaattaaataaagatcagcagctatttggcttgctcaaagagtttatggaattttgaaataatggtaatttgaactaatcttagatgagatacaggcttgccctccatttttccctcccttccatcctccttttaactttagacaaatgagattggataattttaatgtactgtttgacgcaaatttactttgagcacctgttgtatgctgtggtgaaacatgatgcatggaaaaggggaacatataaaataaaagccccagccatcaaatttttcattcaaagaaaagatacataatataattagaggataataatagagatggcacctaaaaagtggcagatcaactgtacatgcattgcatgcctaaaaaatggaggaaaacggcatggctgtaacctgcgtgactgggctacacccgggggaggagtctgggcagggtgggcttcgcagctgggaggaaatcaggtgcccgaggtgggggcgcatttcccggagctggtagggaaaataccaaactgtggaagtggcctaggcagccgggttgtaaatagttgaagaccagcttggttaggatccagtccagcagctccagctcacggaaggccagaggcagcttctccatccttcttccccgactgcactaagtcctcgttttttttctttctttttctacaccctgcccgcaaataatttgctcattttttaaaaaagcaatattctacatttctggtaaatctgttcttttttttttttcagagtgacacagcattctagatcactgaaactaatctcattttacagagacatttacacacatttttagaaaattatttcagccattatcaataaagagaagaataaaactttcttttcatattaacaggagcaacaattatctttcttcatgatacttaaatataaggaaacagataatcaatgagtaaatgaatgtccaagaatattcatttatccagctgacactctttgagtggctacctaatacctgtcaggatgctgaatttggagcaataaagatcacacaatcatcatggccctaactctcaaaaaagtccaagcctcttgcagagttagacataagagttacaaaggcattttaagatatgctatttgttaacatatgctcaacaggttagaggatcattcctggattgatattgtttctgtcaacaataattagagcaccgaaattttcatgtaatatacctcagagaacattttcctctgtgcattagaaatagcattcttttgaaaaagattttttttcctaaattgacatctagcaaattacttcttattgtaacagaggctttaccatttaaattagtattttaatccacaaagatataaacaagaatacaatttttaatttctgctgttaagaaatttctcttcttactagaaacaataagcaattcattaaaaacctgacagtggaaattaactactgatagatgccattcatctgacaagtgacctatagcattttatttttactgctgggcttcatgctagttgcttttctaattcagatccctttgaaagacaaagcagaattattcaagaaagcatcatgtttttagaaaaccacaggctcactgctcagtaatattcagaaatttctatttattaatttattgagaagtattaatctcatcttatttattaagagtcactagaaaaaaattcatgccaacctttctggagaaaatgacttttggtcccaactgaccagaatccattttgtcattcaccttaatttggttatttttggtcgatactcatagccttcagttcttgaaagtagatgatagctatcagtctcttaccccataaacctgaaggcctagtacaaccaaaaaaagtctaacatcaaattttgccaaatgtaaaaagcattttttttttgcaaatagatataataacagctatatggccacgtgtcagcttgatgtagtcccagctgtcttttgaagctgtctgacagtaccttgcctgaaaagttcattagagacttctgcaactgtgtttcagcagcaggattcagctacccttctagttagaatcaggtaacaaaactgttttgaatcagctgctgagctggaacggtagagcatagggcccatgttgggttcacaagattcttataccactttgcaagaacaggaatgcctatgttatatttgcaactaatgaacacattttgaacaccactgatttcacccatgaagcagccttactaaaaaccattattctaattaacaaagcctgtattaataggaaacaaaagcatgtgatatttgcggtagttgttttaagagcatggacctttgattagtctttgcatgttgtgtagccaccctgggttttatttctgattagtgtatctcaaatgagaactagcattttcctgatcctttccctgtggttaaaactcttgaacagatgcatacaggcatacttcatttttttttgtgcttcacaagtaaatattgctttttcttttttaacaaattgaaggattgtggcacacctgtatcgagcaattctattggcaccattttccaccaatgtgttctccctttgtgtctctgtgccacattttggtaattcttgcagtatttcaaactttttcattagtatatttgttgtaatcatctgcaatcaatgatctttgatgctactattgttattgttttggggcaccacgaacagtgagcatataagatggaaaatttaataaatgttgtgtgtccaactgctccctcgaccagccatttcttccccatctcttcctctccttgtgtctgcctattccctgagacacaacaatatcgaaattaggcaaattaataaccctatgctggcctcttaaatgttcaagtgaaaggaagagtcatactctctcactttcaatcaaaagctagaaatgattaagcttagtgtggaaggaacgtcaaaagccaatataggctaaaggctaggcttcttgtgccaagcagttagtcaagctgttattgtaaaggaaaagttcttgaaggaaattaaatgtactactccagtgaatatatgaatgataagaaagaaaaacagccttattgctgataagaaagttttagtggtgtgaatagaagatcacatcagccacaacattctcttagccaaatcctaattcagatcaaggccgtcaacatcaaggcaggaccctctaccagcaaaaagattatgactctctgaagactcagaggattgttagcagtttttagcaacacattggttttaaattaaggtatatacattattttttagacataattctattggatacttaatagactacagtatactgtaaatataatttttatatgcactgagaaaccaaaaaatttgtgtgacttgccttattgtaatattcatttattgcagtggtctagaaccaaatctgcaatatctctgagatatgcctagatgtatttcattatctagctgaagtattttaagtaaattataagggtattataataatcttaaaaatttatttccacgtatgtccaagatgctctattgtcactctgagtggaggcagatctagccatagttaattgctttcgtttagttttgttttcacactatatctttaactaactcttaaatccatatgctattctaagttgatttatgttgtctcctgactttcctttacctgcttaatatgctacaatatttgcaaacctaaccaaactttgcaatttactaaggaactttaaaatactgcatatttgtgggtttcaccatggagaatctggttgagaattttggaagataacccaagaatctgtattttaaaactttccccattctaagacagtctgtatgcaaacaattgttgaaaaggaattagacaggaccatctctgtttaaggatgaccatttgatgtaagaaacaatatatcaagaactgaactctttgcttccttccctatttttctgcatcaatgaatcttagtgccctatcattctcctaataccccagcacctcaatctggaagtcagttcgatcttatttttttcacttgaaattcactagtgccagtgcctggtggtggatcattttgatatttgcagctgtcatcttatttagacgcttgtgcatgcctggttcactctgtaacacatttcattgcctgtagtgtctcttgccactctgtgacaactgaggaaaaatttcttacaataacaatgctatattgcctgcatttccaatatattcttcttgagttttctccaatcactgaatttttattttgtaatcagatcatgtaggaaaacattggatgtcagataatcggttaacacattaatttgtttaaatcttaaaagtggtatttttactttctggaatgccctttctatcaatattaataaccagacatccagactgacctcatttagctataatcacatgtcaactatgtagaggattatacttcgatttgtttgttgctaacttcatcggcatgagaggacaatcaaggtgacacatgacacatagatgaccaaattaccaaagctctgaaacagtctaccaatggcaaaactgcagctctcatttttgtttttaatctttttataccactgtgctgttcaatacagtagtcactagtcctatgtggctctttaagtttaaattaagtaaaagtaaatgtatgtaaaacttgagttcctccgttacattagttacatttaagtgctcaagagcctcacgtggctattagctgcagtattgggcagctcagattatatttccaacattgcagaaagttttactggatagttccactgtggagtccctctggaagtctcaaggtgggaagagactcacatttccaatatcaacaaacctactcgcctttctccctgctatgttgacttccctaatggctttctgcagtttgggggtttctacattgtgttgaggcttcttctactacttcaccttgtatgcacatgcttctgtgtttgacaaagactttctctgtcactggtgtcaaaagttgcacacatacacacatttatttaagttaaacaaaataaactctttattttgagatgaatgcagattcatatgcagttgtaagaaataatacaaagagatcccatgtatcttttactccagtggttcccaaatttttggcaccagggactggtttcgtgaaagacaatttttccattgattgcaggggcagaggttttggggatgtttcaagtacacactacatttatcatcagattattagattcttataaggagcacacaacctagatcccctgcatgcatgcacagttcacaatagggtttctgctcctaggagaatctaatgcccgctgatctgatgaaaggtgaagctcagctttgctggctgttcagctgctcacctcctgctgtgcggccagcaccagtctgtggcccaggggttgcagacccctgctttactcaacttccctcaatgataaggtcttacaaaactgtaatacaatattacaaccaggatattgacattgttacagtcaagagacaaaatatttatatcatcacatcacccatgttgcttttttatagccataccttcttcttaactcctttcaaatttaagttcagaatccattttgagtcaatatttgtgtgtgtataatgtgaagtttagtacacttgactcttgaacaaatggtttgaattttgtgggtccacttatatgcagatttttaaaaataaatatattggagatttttttggagatttgaaacaatttgaaaaaactcacaacgtagcctagaaatatttaagataaaaactaagaaaattaggtatgtcatgaatccatacaatatatgtagctactaatctattttatcgtatactaccataaaatatacacaaatctattataaaaagttaacatttttcaaaacttgcacatgcctttacagactgtttatggtgctagtcacagttgagagaaaggtaaacacatgtaacagatgcagtgttaaatcacaactacataaaattaactatagtaatattgttctaccataataattttgtagccctgttctgttgctattgtgatgagctcaagtgttggaagcatccaattaaaacaccctgttacactaatcatctccttttgagtactcatcctctcctacaaattgtgaattgcagtaaaaagtgagctcattctcgtgtacaaacgttccatcatagtgctataccgtaaaccttgaaaacagcatgagacctacaaagtgctactaatgatgctattggtattcccaaaaagtaaacaaaagtcataacattgcaagaaaaagttgaattccttgatatgtaccatagattgaggtctgcagccatggctgcccaccatttcagacagatcttataaacaaatgatgtaaacttatggtatcaataaatgcaatactatgaatgcattttctattccttatgattttcttagtgacattttcttttcgctagcttattttattgtaaaaatacggtatgtaatacacataacatacaaaatatgtgttaattgactttatgttattgggaatgcttccagtcaacagtagcctattagtagttaagttttgggaaagacagatgctgtaacatggatttttgactgcacaaggccagtgcccttaacccctacattgtttaagggtaaccagtactaggttaattattttaattttatggatgtccaatttttccagtactttgttgttgttctttaaaaagcttgcttttgaattgcttttgcaaatttgtcaaaaatcagatgggcttatttctgtggcgctgtttttgggggagtacattttcttcctttaatacgtatatctattcctctgccactaactatacagttctgattactgtagttaaataatatgtcttgacttgggtagttgaattcctacctcctttggtcttcttttacgaaattgttttagcgtgtctagttcctttgtctttccatatgcaattcagaatgatctcatctatacctacaaaaaatttacaaaaatgttgataagaattgcattgacctgtatatcaatttgaggaaaattgacatctttacgttgttgagactttcaatgaatgaaaacagtatgtctttccattccatttgttaagatcattaatttctcacatcaacatcttttagttttcagcatacaagttctgtacatgttctattacactgatgactaagtatttcattttttgagcaatcacaaatattttattttgaatttcattatccacaggttcatagctagtttcagaaataaaactgatttttgaatattattctagtattctacaactttggtgaactcacttaatagttctaatagtgttttgttttgtttttttagattcctttggattttctgtgtagataattatgtcatttggaaacagggactgttttattttttcctttccaaggtgtatgatttttattttattttcttgctttattgcactggctaaaatttctaggactatttgcataagagtggttagagtggatagcctggacttgtttctgatcttagggagaaaacattcaggttttgaccaccaagtataattttatctgtaaagtttttgtttttgttttgcttgtttgttttatagattctccttaccaatttaagcaatttctctgtactcctagtttttctgagagttttttgtttttttcttttgagacagagtctcactctgtcacccaggctgcagtgcagtggcgcaatctcggctcactgcaacctctgcttactgggtttcctgcctcagcctcctgagtaactgggattacaggtgtctgccattgtgcccggctaatttttgtctttttagtagagatggagtttcaccatattggccaggctggtctcaaactcctggcttcaagtgatccacctgcttcggtctcacaaagtgctgggattacaggtgtgagccaccactcccagcgtaagagtttgttttttaaataaataggtgtaaaattttgttaaatgatttttctgcatcaactgaaatgatcatttgcacctgctgccatacctttttttagcctgttaatgtagtagattacattgattgctttgttgatattgatccagccttgtattcctggcattaaccacacttggtcatggtgtataattctttttatatattgctagattctatttgctaaatttctgtgaaggatttttgtctatattaatgaattggtttattttatttatttgtttatttttttgatgtgtgctgtctgtctggtttgggtataatggcaatactagcttcactagctaaattggtgagtattcccccttccatgttctgaaagagattatctagaattgttgaaaatatttccttagaagtttggcagattgtttccagtgaaacaatcagggcctggagatttcttttttgggagttttataatatgaattaaatttccttaatagttatcggactgaacaagttatctatttcatactggatgagaagtagtatattttgttggttttttctcttttggaggaactggtttatttcaactaaattgtcaaattatgtggtaaaattgattcccttattacatttttgatgtctgaatgttctgtagtgctatcctcttattgataatttgtgtcttttctcattttttctttttcagagttgctagtattttatcaattttattgatattttcaaagaatcttctctttgcttcattgattttctttatttttttctgtttctttttccatattcttgaattatgagcttagattactgatttgaggctattgctcttttctaatatcaccattcagtgctaaaagttatcctctcagtactgccttagctatgtcctacaactttgatatgttgtattttcatttttattaagttcagtgtgtgtatataaatatatgtatgtgtatgtgtatgtatataggtataaatatgtattatatgcatatataaaattttttttcttatttttgcctcatggattatttggaggtgttgtgtttcattttcaagtgtttggggaatttcttggtatctttctgttattgatttttagtttaattcattgtggtcatagaatattatgattcaattattttaaatttgttgagatttgttttatggcacaggatatctcagcatatgttattgtgggtacttgaaaccaatgtgtattttgctgttgttaggtaaagtgttctataaaggaagatttgattatgttgtttgatgatgttgtggagttcttctatatccttacaggtaatctgtctagttcttctatcagttgttgaaagaggggtgttgaagactccaactgtaattgttgatttgtctatttctctttttagttagagcagtttctgctttacatatttctcagccctgttctttggttgatgtatacatatttgggattccttatcttcctggtagattgacacttttatcattatgtaatgtttttctctgcctctagtaatttcatttgctctaaattttacttcatttggtattgatattgctgcttctgctttctgttgataaatattcacatgatatatcattttccatccatcttctttcaatctacctatttcatttgaagtgagtcatagcatgtctttgggttatgttttttaatccactctaccaatctttgtttttaaaaaaacgtatttaaatcaggtacgtttaatgtaactattgatatggcaaagcttacatctcctgttttatttttaattttctgtttgttctctgttttttgtttctttgacactgctacagcaggaagcagtgtctcattattgccaagtaggataaaaatcccaggtttctctttcaggctctgtgacactttaggaagtgaggattcttattatgtgaaatgggagtgctgacccctcactatgacttcattgacactagccatgttgggaggggtacgagcattgccttattactgggcctctcttggccaccccttacatcatgcggctgggaagtgcctgattgtgctgggcacaagtccctgatttttcagtagatcctctgacatcacctcagtgggaaggagaaaggacatatcagtgcttacgaatgggagtggaagtccaggctctcctcctgatttccctgacaggggttggggaactgttattgccttcaaaagatgtaagacccagctctttactctgccttttctgacaccacccaagcaaaaaatgggggagtgacttgttacagcctggcaaagagcgaggcctaagttctctattcagcctttattggtgtgggtgggcatagagacaatggtgttttgttttgctttgttttgttctgtttttctgtgatgtttggctagattagaatggttattgcttaacaggttttctgttgttgttgtataggatgttcctttcctagccctttggctaaagagaacaggcttttgttgagggttttcttggtctgtgtccactggcatttccaggttgtcagctttttcagcttcaaatctggaacatatgatggtaggaaaatgtatgtctactccatcttcccagaaatgaaagtcctagctgaagcctttgaataaaactttactgtaagtttgagattaatatgcctggaactccgcaaatacagacagcccccaacttagtagtttgatttacgatggtgcaaaagcagaatgcatttagtagaaaatgtacttttaattttggtcttctcctggtcccacaatatgtagtgtgatactctctttggatgtcgggcagtggcagtgagctgccactcccagtcagttacatgatcatgaaggcaaacaactgatactctatagtgcactgtgttgctagatgattttacccagctgtggggtgctttacgcgttctgagcatgtctaaggtagtttaggctaagctatgatgttcaataggttatatgtattaagtgcattttcaacttaagatatttttaacttatgatgggtttatttggatgtaaccctatggtaagttgaggaacatcaatacttgttgactagcttaataaatatcaatactcattgaatagtttaataaatatcatacatatatacttcagaacccagaagcttagaccctttcttttaatgtcttgcaatgttcattcatagttattatcactttgcaatcgtatatttgtataattatttgattaatatattttcttctaacacattaaaatttcataaaggttcagaaaacatcatttgctcaccaatatatcagtagtacatagcactgttattctgtttggcatatatcatatatttaattaattagttgcatagatttttaaaagtcaacacataagcaaatgaagtttatgtatttttcatggatcctctctgaaaagctagattctacccttgcctggtataatagttacttctcagccaaccactatatgaaaaacaacagcttatcgtctccattaagagtgctcctgaaccattcctctcaaccctttaaattatgacagatacatctatacacaatatgaatatttgtttggcacactgggaataaatagacaaggcagcttgtagccagatatcaccagccaaagctatgagtcatcccagatccacctgagctggtcactttaagcaatgagaagttcaatatgttggcacatctgtaaccaatttgtggcacaccagagttcatttgtggaaggttgggaaatgctgatcttgaaggtgtctttatccccaatctaagtccatcttctccattccttttttcttttcctcagaaatattggcaaagaaaataccaatttttattaagggaaaacaaagccccatccataggaggacactgccctgcatcttgatcaagacaatcccaccagcatatgatagtattgtattacactggattattcagtcttaaacatcatgtaaaataataatggtaaaataataatagttgatatttattaagccctaaatagatgccaggggcggggctatgcacgtaaaataattttatttgatgctcaaaaaagccatttgaggtaatattattttccttatgttaaagataacgaagttgaggcactatctttattttacaggtgaagtaattacctgaggtcacaaatctattaaatggagattctggatttgaacttgactctagagaaggcattctcatctgtgacttttaactagttaaatgcctaggaatgaatgaagaaagaaaattgtgtgtgtgtgtgtgtgtgtttaatagtaattccttcagtggagataaacatcagtcttgaaatttcattctacagtctcagactcagcaacagacctcttaactttggtgtttcaaataaaaatatacatttttcctcgataagacaatgtaaaatttacaggcatagcatagtctaatttaaataatgaaatatacatgcctttccctcaccttttaggttaggcactgttagctgttcgctaactatatctgttctccgtttcttctgtagtatcagagtttcagctaaagatgatattgtgtagctttcttgaatcttaatgtggccacttgattaagtttgggccaataggttgtgaggtgtttcatgtgtcaaatatctattgcagctactaaaatgaatggaatgttttctcttctccatttctctttctcactagctgaaattcagacttgatggtaggagatagagcagtcatcttagaacgtaagatgggagatctgttgaagaaagcaacataaaaagtcctagatcctatgataattcaatagaaaccttgtctacttctcactagattgctggttgagagagagaaataagcattttcttttgttgtttaagcaactgtttggggatttattttagcagtggaactaggtttttctttggtgggggtgagttcataaccaactcttctatctactactttgtatcccaaataatcaaacatatcagttgatattatagagaaattacttgcctaagtacagctgcattcaaatcaattgtctcaaagttttcccaagaatacaatggcttatataactaaaagaattctttaggattttccccctagaagaaagaaaggaacagtctttagaaaagagtacctacatctccttttctatagcacagaaaacttttttctttcttggctactgagttctatcaaaagtaaaaaataaataaataaataaataaataaataaataaaataaaaataaaaatcttagtagccttagccaaagctctttgtgcctggcattagtgtctactagcttatcagtttttgttctttatatatttgtgtgtcccttctgtctccagctacctagaatgtaagtttctcaagaaaagggatcttttggcttttattggttatttctttgtgtgtatatcttttgataatatctggttttgtgctctgaaatggataatattagatcttcagtagatgatagaaattgttcaataagagtgattattgagtatttttaaatattatatctctcagttcaatttgttatgaaactttatgcattggtttcaaacatacggaaatatggggagagtgagctcatccaccaaagggcaatttaattttttagaatctttagaatttatttattttaaaatttctcagtgactcttttgagcataaagttttaaaatatttgtcattcttcaaagtaaatgataatgaaattctatctgttttggacttgatctgctaagaaaagcattcaaagagaaaatttgactgcaaaaataaactattaagtagcataactatacaatgatgtacatcagtatttgttttagaatttttagttattgaataaaactatagacactatatgtagctagcttatactgaatagtgcactttataaatgaatatgataaaatttaatgtattttaagaacaaactaaatcattaatctatctttattctttcgattaaagacttcaataaaacagaaaacgaaggaagaaaaagcaaagctaaaaaagatataaggaagaaaatctaaagtataaatcaagtacaatattttacaaatataaggagtgtgagttacaacactgcatttccacccaaatgtaaatattggagattttcctcatattatcaatgcatttctgggactccaggattccattctgttacaaatgattaaccttattgaaaagaacattcaaatgctgtgcaactaatatgagactgatacaattttttcacttaagtaaaaacctcactgccaaataaacataaaatgaatgtgcaaatgatttttaactcattaagtgagggaatcattgaggtgttaaatccagttcaaacacacatgcatacacacaagcaaaagtaaaatcagaaatgccaaaatgaattacagtatagttaaacctgattatcaacctcaaacatataatgttagtgtatcttttctacaaggcatagatcaattacatatctactggaaaaaatcattttattgcagtggaaaataattgtttatattactatggataataatttacatttctattaattttctacaaggcagtataagctgtatacctctgtagaatcagataattcccaaaatgtctgctagacaatatctagctctctactgagaggatatgtagtaatcttttttgtacttttcaagtcttggacaacttttttcctgacaagctttaacaaagtcttgaaacatgatatttagtaaagggttaactcagcaggctttgggtgttcaaactttatgtacattccaaagaaaggactggtcttgactggctccttagagatacgttataaacccttggatcatcctgtccaatgagtgttttgtatactttggacctttggccactctaacatctgttagcatggatagctcatgctaacaaggtgatttttggtggatgtctgtttttttagttttgtttgttttgtttttcacctgaggtccttggccacactgtatgagtttgacctctaagggggtgctgcatatttagtagttaaggtcagttgtgtgtgcactccatgcctttgtgatcaacctccagtaaaatcccaggaccccaaggctcaggtaaactttccttgttagcaacagtttgtacatgttgtcactcatcactgctgggagaatgatgctctgtccatgtgactccactgggagaggacaattggaaacctgtgcctgatttctcttgggctctgccctatgcacctttttcactggctcattttaatctgtattgtttctctgagtaaactgtaaccatgagtataacagcttttctgacttctatgagtcctaatcaatcattaacctgagagtggatatgcggacctttgatacatatggataaacataattttgctggacgttcaggtaagtgttgatggaggccttcaacaaacagaactgagaggctgagacactgatcttgtatcttcaggttgatttagtatttgttaggatggtcatttgtcataatctacagtgaccgcttcctgaatctgatcacaggggatgctgagtagggtatttatagaaatctctggacttctgcacatggtgtcttcaaatcaggcccaactcatcttctccaggatgcctctctattgaactcacctctctgcttccctggcactctcccagaagatagtctaagattattttattccctttcaaactaactgcaaagcataaattctatgaccttcctcaagacctggcttttacttctctcaataagaaacagctcttgtaaatcaaaagctttgattttaaaacttttttttctgatctggcacaaagagtagattttggaagtaaaacacagtatgctttattttttctctttgtactaaaaaaaaatcccaattttttttcagcagggtggtaaattcctttatgtcatgcactgtgccccccttggtctataatctactatagatcatctttcattatttgactcttatattcatatgaaaagattttgacaattatgaaaaatattgttcaattttaataaagcctatcttgtcaagacaattatctccctaagtcttcaaaatgtctttgagtctcagagctaaacaatgactaaaacttcctttctttcctggggaaataatccttatgtcttggctttaatggtagaagggacacaggggaagaatccagctattgatgaggtattatttccctacatttgctgctcaaatttaagacatttgtactttttctactgtaggttttactttgaccattgattggcaaagccaaatattgctagtgtgaaacggctggttattcctcacacaaagatttttagttttctggcaggcaacttcctttggacatctctgacagctactatttagtctttcctggaacacttaagtacacatatttttgagaagcaggattccatgttccacaactccaaggatgccattcacatccatgtaagttgtggttccggtagttttataatgggcaacctatgcagtaaacagtggccctgaatacactccaattgtttgacagctttgtttgttagaaagaacagctgtcttcaaacatgttaaggcttctacgtagaagagttaaaataattgttttctgtatgatttcaaaggctaaacaactgttctagtgtgtacatcccagataagcacagataaaggttaataaaatgaagaaatttttaacagtaagagctgctcaaaagtaaagcagatcaccttaagataaatggaattccaccactgaagatgttcaaataaaatttggacacctgcttgatacagatactgtatggggactcagttatcataatacattaataggataaaagagtatttaaattttcctgctgagatgcaatgattcgagagatcgtcaaagttgctagcacttagagatgtaaatgaaattcaaactcattttataactgccattgggttatatacaattgtgattattatcaagttagagttttatgcctcaattcagacagctgacctggaataaatgattgaatgaggggttctgtattcttctgccagatttcatttgactaagcctttgggagtaaattagcccaatttaaggattaaaatctttaaaaatattagccaagggtgcttaaagaaagcaagataagtcatagtgctggactgggctgggcataattaatacctggcatgccatcttcaactgatggatagtcacctagaactcgatgttgaggattattaggtcatatctggattcaactcaaaatataccttgtatgattagtgatgagagggacaaatggtagaatatactgcacatatttgctgtctctgtcatggagactactcggtatgttatttaggtagaatgcatagaattcatctcctggggctgggtggggtggctgacacctgtaatctcagcactttgggaggccgaggtgggtggatcacttgaagtcaggagttcaagactagcctggccaacaaggtgaaaccctgtctctactaaaaatacaaaaattatctgggcgtggtggtgagtgcctgtaatcccagctacttggcagggtgaagtaggagaatcacttgaatgtaggaggtggaggttgcaatgagcagagtttgcgccactgcactccagcctgggcaacagagcaaaaaaaaaaaaaaaaaaaaaatttactccctaggagatttcacctgcttatggctttggaactgagctgtataggtccagcaactcaaagcatccatggtcaattaggatcagcattaactcatacaactcagaagaatataaggtagaaatcagaatgccagtacaataacttgcaattagaattattactgtcaagttgattaaaattcctgtgtcttttagctagggcactcaggctgctgtgtcattgagatagatgagttaataatactaattaagactttgtgtattaggttataactttcctttttcaggatgttgaaattttactctaactttctaactccttgagactacatccttgttccctgccttgactgtgatcatatgtttgcacttaattccttctggaagtgcttccaaaactatccgtggtgaagacctaattcattttccttttctgatccatcatgaattagtactttgataaaatacaataaaaatgagttataaaaataaaattttaaaatgcacaatataagcacaatttcaattaatgacctccaaatgtcttattaaaaattttaagcctttactctcaatttcctttctttctttcttttttttcttttctttcttttcttttctttttttttttttttttgagatggagtcttactgtgtcacccaggctggagtgcagtggtgcaatctcagctcactgcaaccttcacctcctgggttcaagtgattctcctgcctcagcctccccaggtagctgggattacaggcacccaccaccatgaccggctaatttttgtatttttagtagagacaggtttcaccatgttggccaggctggtcttgaactcctaaactcaggtgatccacccacctcggcctcccaaagtgctgggcttacaggcgtgagccactgtgcccagtctttactctcaatttctaaactataattcacaagcagaatagctaatggagtgtttaattaatgctaacaaagttagggaaatagataataacatgaagctttattttgtatgtattgtgcgaacacactgtaatccattagggtccctgtataatcaatgcagtcagtacatttgtattcattaaatggaaatagagaacaagtttatggttttaaatggctatagatgtctatattaaatttatttaacatttaagatataaaatgtaggcagagatgttgatgtgtataaaatgtacttgaaaccaagtccttcctaaaacaataagccaactcccaaagcaatattgtttatacatgaaattatgatattatttatgtcattttgagggtaaaaatttgggtgaaatatgggaaatatttgatcaataatagtatcagaagatgcacagtcactgatttgttccacaatcatagataagtgttctgtggatacacaggagggatatttatttcatacacacaccctcaaatccctttgctctgataatgtttactcaatgagccacaatgatgacttctatcatgacaaccacttgtaagccctcttagtacagttttatttaatctattaaattaataaatttaccattaaacaaatacgtttttagctaatgcacgaaacagtgatttattcttcttctatcactgaaacttagtcacctgaatttcttacacatcactcagagtgactgaaatgttgttcttttctgggttttggtcctagtacttatttaatctgattttatttatttatttatttatttttggctctcaggccccagcatttccaatctgtaggaacttttattgcttccccatgttcagatgttttaagtaagactcaccaacatttcctacagtcttttgcatatttcagtctttaggcttgacttcctggataatacttaaacccccaattcacgagaaaaatcctatattcttagaggttagggagattttaccttagttcttagcacagccataacttttcttattatgtaatcccaatgccttgccttcttaatactgatattttggggatgagagagtctctatggcctggaaagatcatttcctagcatttctcagatgtacctttagtgctatatctggtgtccaactgggagtatccacccttagtaaagctgaaagcttgctttttcgtgtctacttatatgtaccctgcattaaaatatcatgctcacttatttttagacacattcttcatagagtgggaatgacattgtctctgccttacaggaaatgcagaccatctctttgtggaagactggccatataaatgtctattgcaaccatggcctcttttgaacttcattcctgtggtcgcctatctagaggttcatttggaaaattgaatttatcaccataatggtctcaatgccacatcaactgccatgtctaggtacacaattgccaataaaatagttttacacttaaacatttcctttagagggatgctccttcttgataatttgtgctatcctgaagcaaaaaataatcacacctatttataatgagcaaagttgcatctccactggcaaccccagtggatatggttctatcagacactatcagccatactttgcagatataatttcctagcttataaaaatatatctcagatggtcacatgagctccctctttatgcaaacttaactagtagagattcatattatagaaccactaccctcattactccttgtctagagaattcacaacatagtcagcttgtatatacttcacttgtatatttgatatcaaacataccaaataaagatataacccatgcaaaaacctttgacttgaccatgctttaaactccttatgtagaaggaccactattatgttcacaacaattaattgtcattttacaatgaaacaaaattataacaacattcactaatcatctaataagtgataaaaaaaactgttttactagctgtgggggaggtatacatatagttaagataatgtctcttctctaggaaatcataataaattgcaaaatatacataacactccaattgaaagagtgataataatcacataaggctttaatggagatacgcatgaagtgctatcagagcacagaggagagaattaattcttacttaggtgtagggatcaaggaaggctttgaagaaaatgataaatatgggctgaagctttggaattggttggactttgacaagttaataaggatgtaaagggatgggtggcctggtgtagtggcagggggtggtagggcaggcagtaatggagggagagtgcatttgagtaaaggggagaaacatccaatgcagtttcctatttgctgactgtcacacgtttttaactttgtagggaagatggaagaaaatctattgaaccaattgttttggctgttctgatgtgatcacagcattgcttatatggattgtcaaacaagggatgagctcataaaaggatattaatgtgtcgtttttattgagcaaagtagcattacagaaaaggtgatttcaaaggcacatggctctttcattacagccttcaggggcaatgtttgatcactgaaaacaggctgctttgttccagctttctctgatgtttggcattattctgaatacatatgctttgacttggatagaatcagtctgtaaagatttaatagattcgagatttgcttattcaaaatacatgttttatggttaaaatgaaatgaaagccattttaatatgtatgtctatatatacacagatatatttcagacacatatctcagcaatttttttaaaagcaattacacatattatgtgtttgttttgagataatgaaagttggatatttttaaaattcaccattttaacttatcaagaaggaaaaaatatattttaagacacattatattggtgataataaaatacaagatttccagttttagcgacttaagctttgctatatgtccctgtcacctatcatagacataactttctagctttctagtgctggacatctctgaacactttctttattaaaaatgagttaacagctttcttggttgaagaacattggaagtcacgaaatattaaagagaaattacaaaagattattatttacatgatagtcttttccttatgtgactgaaagaagtgagcttttttcttccaaaaggaaagacttgcttggaaaaagacctgaagagtcaaaagcttttcttgtggtgaccaagactcatgaaatttctttttatagaattctctggcttctattccatgtgaattgatatgaaatctcacataaatttatctttttattttgaattccaattgaacctttaaaagaaagatgacattccaactcagccaatttgatatacattacatttacaattagataatcagtgcactgaaattaagcccaacagacttcagctgaaatgggctacgttagattatgttccatttaatatgacaaagaaaaattttactatttgcttctttacttaaaagccttccctttccctctctccacttataacatcctctaactcaatgatgcccagtgctttctctgcttaacacattttcccctctatgttagttttgcaacaatttcaaacagagactatattgttatccatttgttgcctaggccaatgtttgcaaaccttaatgtccttataaatcatctagggatcttgttaaaaacacaggttctgattcagtaggtctggggtctaagattctaacaagctctcaggtgatgtggtggaccaaggtttgtatagcaaacacttagagtacaaatgacctgtccttaaatgtgtttttggaccatgataactggaaatgtagattctgtgactttgtggttgcttcatactttaaattgcttttttatttattgataatgaatcaataatgaatgctctgaaccatcaggactccctctacttccctagtctctgtttttaccacttcctccttcttacttacattttagacataacaaagtacttgaagtttccagaatgtatcaggctctttcacatctcagtgccttttcaaatactatttcctctgcctgtcctggtgtcctgtgactcttcctttaaaactcaaatctgcagtcatctcctccaggaatccttctctaatctctttttcatgtaattgcataattaaatgccttcagtatactcccacattgccctgtatttcctttattacacccttctcctaatctgttgcaattgtctgcttaattgttctttcccttcaagacaatgcttctggggggaatgaataatgcattttatctctgattcctattgccaatcgccaacatagtaggttttttttttttaatcaaagtttgctgaatgaatgaacaggggaagttgatgtgttgtagtcatacaagaaagtaatgcaatatttcttctcatgaagtttaaaattgaattgggagtcataaaaactgaaactcataaaaaattaagtatagggtgagataatactaaagatataaaatgttagtatgtgattaattgccaaatgaggatcatagcaaataaccattcagagtcaattgggggaaaaatgtcactgtggatttattagtatttttaatacctcaatttgttccacaaaggacttgagcctgctgataacattaagcattaaagttaacgaaaatatgagcacatatgtagttaagggaatagtatgagacaaggagagggttatggaaatatgtaccggaagcttgaggaatggatagactatccttaatatgtattctttagatgtattcttcttgtctgcaaaaatgcttcttgctcagataaggacagtaatgtgggtgtgctggattttcatacccactctgcctgggaagctgacttctgtggggacattagtagctcgcttgtcctctggcttctggcagaatttggctaatgggatgcctatggagaagagtgaggtcaggacatttattttctttggttgcctagaactggctgtgcctctttttaaagatggcccctatgataaacttcctgaaattattctaatttgagtgtgccctgttacctattgggactctgatatgacctcagagttgttgtttagagctagattggataccaggcttactaacttttctggcaaccatcaataccataaaaatgttctaggtgcatgctacatatcaggaacaattctatgaggaggtggttctacacagaaaaattcagaaaacaaacaagcaaacctaaaacgctgtgctcatatacttcacatgtagtatggcaaagacaacgtaaatcatcttggaagtcaggaaaaactgatatatataaaagctcacagctctataatgtttatttatacttgccttaagttagtgttgaattgtaaagcaataatatgccagagatatagtttttgggttgtttccttttcactgggggtagattatccagaatttttgcctctgctcttggctgttgttcatcttgtggttattttactcctcactgtccttccatcagggaatattaaaggaaaataagtgaatgaaaacttagctgtagcatctatgataaaaggtttgtcaagaagacgactgaaatactgactaaaatgaagcttttcagtttatctgggttggtctgccccctatcgccacaaagatactcagaatggtttctagcttgtcaaaaaccaagagataaaaatgggcaaaaagttttactttcatgctaatgaagagaaccagatctaataaataaatatgaccctcttaatgtgaagccctggtgtgcagaccctctttttcatctccaattgtatgacaaccttgtttgcagttgttatttagatcatttttgagtcatatgagcttaattttgtgacccagcaaaaacagatcataaatctcagtagtggaagatacgtttgtagtttgaccatggtaagatgagctgagggtgctgaggaaatcataaattcaatttacaaaaataacaaaaataagatttatttatatttggcccagtgaataaagtgaaaatctaatatttttctggtctatgctgtacattttgccaagcttgattaaattcctgtttagcaggtagctaagagaggaactgaattaaaacactttatattaagcttttgagtctactttgttcttcactgttttctttttaaaaagctgttttaacttttctttccttttaggctctatttatgaaatgtttggaaatgaatgctgtttttcaacaggagaagtgattaaaattactggtctcaaagttaagaagatcatagctgaaatttgtgagcagattgaaggttgtgagtctctacagccatttgaactgcctatgaattttccaggtacagcacattgcaaccacttatcatttgtacaactatattgttattaatatgtatatatacacaaccaaaaacaagaaaaaaatggtctgtttttcactctaggataatgggggggaaaatccggaattgttatagtttgatcattttaagaacgaatggaaagcaactattttctccttttttaaagtgaaagatgtttatcttgtacttaagaattaatctctttggttaacaaacatttagtgagttccaactatatacacaccactagttgtgctaaataatgagaaccaagaaatcaaagatatattttcataaattctgtagaactaagtaacatcatttaagcctatctaccctctttgctattcctactgtcattactctagctccttggatcaccgttgaccttgcctgtctaatattactgaaaagtcggcctggtcttttttatctaattgactctactcagccctccaaaactagctcaaatatcatgccatctagaagacttttgctgaccctctaacctaatctagatttctcttttatgttcccatagtatgttgggcctcataacatacacctcactggatagtcattgatgactttctcatttgccatattttttacactaggggttggcagactttttctataaagagccaaagagtaaatcttttaggttttgtggccagagggtctctgtcacacctatttcactatgctatttatgtggtagcacgaaagcagctctggataatacataaaccaatgagcatggctatggctcaataaaactttatttacaaaaacaggtgacaagcaggatttgactcatctactgtagtttgctgacctctgctgtagactaaaactccttgacataaaatatgaacatgtgactttgtatttctgataccaagcacaatttctggcacagagtgtgtgctcaggaattgttaactgaatgaatgaatgaatgaccagtggaagagaaaaatctcataaatcttaacaatatgatgtgtttcatggtttgatggaagtatacttgtgttctttgtggggcttgaaaaggaatatcagactatagttggttgtgtttcagaacagggattctgcagccattgtacttgaatcccagctctgccacttcttagctgaataactttgacaagttatttaccctcctttcatgtaaaatgggaataataatactgtctatctcctagtgttattgggagggctacgtattgaaatatatttagtgtttagaaaggtacatggcatatagaaaggtgcataaaaaagtgtcagcttttgttaccattattaagatattattactgtcattggaggagtcaggaaaagctttttagggaatgttttaattgggctgaggttggaagaatgaaaatatattagctatattgaagtgaggattttttcaagtgctctagtattcagtcccctttcaaatgaaactttccacattgttcaattctatttctttcttactcatcttttataacaatgattctcaaatttggctgcacattagaatcacttagggagctttaaaaaattctgatgttcaggccacttacatgagatattctgatttgtttgctctgtggcaaagtctggtcatcaaggtttcttaaagctcccagtgtgatactaatgagcagccagtgttgagaaccattactttataagatgcctctcttaagtactctaattagatgtaacaattccctttttaaatcactatagtttttcgtgccttaatcattgcatttatcacattttgcatgtaattgaggctatttgtgtacttgtctgactaccaccatctgtctaatagatcacaagtttgctgaggcagaatctgaatcttatttattacaataatccccatggtatttagaaaaagatgcacataataaatatttagtaagttaaaatgactagaatctttggtagaaggaatttttcttattagaatagtgaaaacacttagtttttggctaacagtttaatttggggagttgctatttagaatattcttttgaacttccaattagcatgataatcttgcatctattaagtgacaatttgaaaatgatgtttataaaacagttttattgtaaaggacagagtgaaaatggaaaggtaaagtgattggcactggtcagggtatagtttctttcttcaaagagaactcctagataatgatgaaagggatcccagatacagggataattcttctacatcagcactaaggagaaagatagaaatcaaagatactaatgttattcaaaaattttaatagcagcatctctttatttatactattttaaaactatttaagttcccaattagatttttgacttaaaaagtcaaatggtattttaaaacattcttcctcatttgtaaatttcccaaaatttccttttgctattgatttctaattttattctattatagtcagatgacatattttgtatgactcaatccttttaaatgtattgagacttgttttttttggactaatatatgatctagagaatgttctgtattcacttgagaagaatatattttctatttttgttgggtaagtgttctacagatgtctgttggtttatgtgtattgttcaagtcttctatttctttgtgtatcttctttctagttttagtcattgttgaaagtgaagtgttgatgtttccagctactattgttgaattgtttattttcccttcaattctgtcagcttttgcttcatgtatttgcaggctctgatggtaggggtatatgtatttgtaattgttatctcttgttgatggagtgacccttttatcattatataatattctttgactctagtagcaatttttgttttaaagtctattttgtctggtattagtatagtcactccagttttctttcagttaatatttgcaaggtctctcatcttttattcttttactttcaaactacagacagtccccgacgtatgatgacatgattataatttttcaactttaccatgatgcaaaagcaatatgcattccatagaaagcatacatcaaattttgaattttgcttttactaactgcaggctaatgtaagtgttctgagcacatttaaggtaggttgtgttttcaactcctttgggtaaataccaaggagtgtgattattggactgtatagtaagagtatgtttagtttaaagaaactgccaaactatattccaaagtagctgtacaattttgcattcccaaaaacaataaatgagagtttcttttgttccacatcctcaccagcattttgctttgtcaatattttggattttggacattttataagtagacgcctatggtatatcattgttttaatttgcaatgccctgatggcatgtattcaggatatgcttctcatatgcttgtttgctatcagtacatcttctttggtgaggtgtctgttcaagtcttttgctcatttttttaaaaattgagttcttgtttttcttgttatgttttaagaattctttacatatttggggtaacagtctttatcagatttgactcttgcaaatattttctcccattccgtggcctgtcttctcattcttttgagagattccaaggctgtctttgattttcaaccatttgatcatcacatgtctaggcatgaatctttgagtttagtctacttgaagtgtattaagtttcttgaatgtgtagattgtttttcatcaaattttgaaagtttttgccattttttaaaaatatattctttctatacctctctctctctgctctccttttaggaatcctattattcttatattcttatgctttaaggtgacccataggtctttgagactttgttcttttctttatactttttttcctctgcccctgaatgtataatctcaattgcattttcttcacatttgatttacgttatctatttggtaagatattattctcatacttttgttctagttatgtagacatgattttctttagttctttgtatatattttaaatagctaatttaagtttttcttctctagtaagtctgatatctgggctttcttagagacaggttatgttattattattattattatttccatagattcagggttacaagtagtttttgattacatggataagttctttagtggtgatttctgagattttagtgcacccaccaacaaagcagtgaacactctacccaatatgtagtcttttaatccctcacccccttccaaccttccccgctaagtccccaaattccatttatcactcttatgcctttgtgtcctcatagcttagctcctacttgtaagtgagaaaatatgatattttgtttttcattcctgagttattgcagttaaaataattgcatccaactccatccaagttgctgcaaaagacattatttcatttctttttacagatgagtaatattccatggtgtatatatactacattttttaatccatttgttggttgatggacagttaggtcagttccatatctttgcaattgtgaattgtgctgttataaacatgtgtatgcatgtgtctttttcatacaatgactttttttcctttgagtagatatgcagtaatggaattgccagattgttctacttttggttatttaaggactctccatactgttttccatagtggttgtactaatttatattctcaccagcagtctaaaagtgtttccttttcatgagatttatgccaacatctatcatctattgttttttgacttttttattatggctattctttcaggagtaaggtggtatctcattgtggttttaatttgcatttccctgattattagttatgttgggcatttttcatatgtttgttgttcatatgtgtatagtcttttgagaaatagctgttcatgtcatttgcccacttgttggtgggattattagttttcttcttgcttatttgtttgagttccttatagattctagatactagtccttggttggatgcatagtttgcaaatattttctcccactttgtgggttgtctgtttactctgctgcttatttcttttgctgtgtggaaactcttcagtttaattaggtcccatttatttatttttgtggcatttgcttttggtgtcttagtcatgaattatttgcctaagctcatttccagaataatttttctgatgttatcttccaaaactttatggtttcaggtcttatatatcaacctttgacccatcttgagttgatttttgtataacatgagaaatggggatcaagtttcattcttgtacatgtggcttgacagtttttctagcaccatttattgaatattatattgtttccctaatttacgtttttgtatgctttgttgatgatcacctgactgtaagtatgtggctttatttttgggttctgtattctgttccattggtctatgtgcatattttcatacaagtactatgttgttttggtgactatagccttgtagtataatttgaaattctgtgaagaaagtcattggtagcttgatggggatggcatctactttaaagttcatatggtaccaaaaaagagcccgcattgccaagtcaatcctaagccaaaagaacaaagctggaggcatcacgctacctgacttcaaactatactacaaggctacagtaaccaaaacagcatgggactggtaccaaaacagtgatatagaccaatggaacggaacagagccttcagaaataatgccgcatatctacaactatctgatctttgacaaacctgacaaaaacaagaaatggggaaaggattccctatttaataaatggtgctgggaaaactggctagccatatgtagaaagctgaaactggatcccttccttacaccttatacaaaaattaattcaagatggagtaaagacttaaatgttagacctaaaaccataaaaaccctagaagaaaacctaggcaatatcattcaggacataggcatgggcaaggacttcatgtctaaaacaacaaaagcaatggcaacaaaagccaaaattgacaaatgggatctaattaaactaaagagcttctgcacagcaaaagaaactaccatcagagtgaacagggaaccgacaaaatgggaggaaatttttgcaatctactcatctgacaaagggctaatatgcagaatctacgatgaattcaaacaaatttacaagaaaaaaacaaacaatcccatcaaaaagtgggcaagggatatgaacagacacttctcaaaagaagacatttatgcagtcaacagacatgtgaaaaaatgttcatcatcactggccatcagaggaatgcaaatcaaaaccacaatgagataccatctcacaccagttagaatggcgatcattaaaaagtcaggaaacaacaggggctggagaggatgtggagaaataggaacacttttacactgttggagggactgtaaactagttcaaccattgtggaagacagtgtggcgattcctcagggatctagaactagaaataccatttgacccagccatctcattactgggtatatacccaaaggattataaatcatgctgctataaagacatatgcacacgtatgtttattgcagcactattcacaagagcaaagagttggaaccaacccaaatgtccaacaatggtagactggattaagaaaatgtggcacatatacaccatggaatactatgcagctataaaaaatgatgagttcatgtcctttgtagggacatggatgaagctggaaaccatcattctcagcaaactatcacaaggacaaaaaaaccaaacaccgcatgttctcattcataggtgggaattgaacaatgagaacacatggacacaggaaggggaacatcacacacacaccggggcctgttgtggggtggggggaggggggagggatagcattaggagatatacctaatgttaaatgacgagttaatgggtgcagcacaccaacatggcacacgtgtacatatgtaaccaacctgcacattgtgcacatgtaccctaaaacttaaagtataataaaataataatgataataataataataataataataataatttgaaattgagtaacgtgatccctccagatctgttctttttggttagtattgctttggctctgtgggctctttttggttccataaaaattttaggattgctttttctaattctgtaaagaatgatgctggtattttgatgggaattgcattgaatccgtagattcctttgggcagtgtggtcattttcacaatattgactcttcccatctgtgagcatgggatgtgtttccatttgtttgtgttactgatgatttctttcagcagtgtgttttagtttttcttataaagttctttcacctccttggttaaaatataaggttggtttttgtttttgtttaggtttcttttgcagctattgtgaagggattgcgttcttgatttgattctcagtttggtcattgttgatttaaagcagtgctactgatttgtgtacattgattttgtaacctgagactttgctaaatttgtttatcagatctgggagctttttggatgagtctttaggtttttctagatgtacgatgatatcattggcaaatatcaacagtttgacttcctcttttccaatttggatgccctttatttctttctctggtctaattgctgtggctaggacttccagtactatgttaaagagaagtggtgaaagttggcatccttgtcttattccagttctcagtgggaatgctttcaacttttccccattcagtatgatgttggctgtgggtttgtcatatgtggcttttattactttgagctaagtcccttctatacctatttttttgagcgtttctatcataaagagatgctgaattttatcaaatgctttttccgcatctattgagacaattatgtgatttctgtttttaattctgtttatgtgatgtatcacatttatttacttgggttaaactatctctgcatccctgggatgaaactcatgtgataatgatgtattatctttttgatttgctattagatttagttagctaatatttagttgaggatttttgcaactatattcagggatttttgtctgtagctttctttttttttgttaaggcctttcctggtttgggtgttaggatgatactggctacacagaatgtttagggaggattctatgtttctctatttttttggaatagtttcagtaggattggttgtaattcttcttggaatgtctagtagaattcagctgtgaatctatctggccctgggctttttttggttggcaatttttaaattactggttcaatctcactgcttgttattggtctgctcatggtttccatttctttgtgatttaatctaggaggattgtatgcttccaggtatttatccaattcctctagattttctagtttgttcacataaaggtgttcatagcagttttgaatgatattttgtatttatgtggtattggttgtaatatctccaatttcatttctaattgagcttatttaaatcttctctctttttttcttggtgaatctcactctgcaggaacagcttctattgattgcttgccctctcccactgtgtacaggtcatactttcttgttcctttgccttctcataatttttgtttgaaactggatgttttaaatgctataatgtggcaattgtataatcaaattgtttcctttttccagggcttgctgttattggtagttgtttgtttagtgaattttctgaactaaatctgtaaagtctgcattctccatcatgtgtggccacagaagtccctgcttagttagcttagtggacaactgatgtctgaacagagatttacttacacagttgaaaccatgttttcagtatgtgttgaagggctctgttgttcatttgggaacattctgtcaacactcagtcaggtaattgaaaattctagcttagccttgaatttgggctcaggtagagcctcagttagccagaattgagaggtgagggcttttgtgggtctttcttgcgtatgcaaacagtcctgggcatgtgtttaaaattactcatgtgactttctggattcttaggaatatgttggaacttttcaattttttttatggaaatctcatttcccagctattctttttaagtttttgggttagcctattattttttttcccatcactgcaggtagccacaaaagttaaacaattttcttttattatttttggcaagtgctctgagaaaagcctttccccaataatgagttcaaaatgagatcaaagagacaaccatgcaagtgtgatcttccagagagccaccagatatgtcaaataataacaattctctgggattgagctttgaagatacttcaacctcttactgctttctcctatgactgtcaagttgattattttttcgtgattacaggttgttagttttcaaggttactgtggacctgagtgtcggggaggagagaatgggaatacaagttaaagtgccacaaagtttgctgttcttaccaagattcagccatttttcttcaataaatgcttcccaggttgctccaattatttggttaatttttcgacttttgaaaaaaattgacctgctcttctgtattaaagtatgtaaactcatatatcctcaaatttatccaataatttaaaagtattgaagatgacaataccttggcaagagtgcccagaattacttctttgtaaataaagaaaatctactgaggaaagatacccagcctttgaccaataaacatagctttgtagatgcagcttcagcaaatgcaagctcaagaaaaagtcaagagggtaaagatttgcagagtttgacaagcacactttcaggggatatactggagccttttttttttttactaaaatttgaatggggatctgaactccaaatatatgcaccactggtttcatcctatattaatattttatttccatatgtctcttttgacacctcaaaaatgttcaattattttaaaagaaataataagcaatcatttcagtaatgaatgaaacaaaacatactgcttttagaaaacactctttctagctgaagtattttatgagctagaaaacatgccaatcttgccaaaagcaacaaaaatatatcctattcggtagttgattacattatctccatagattggtaaatcatgtcatgtgtggtttatagtgaagttccaaatttctggattacctcctggaaagatttgtccctctttcagagtgttatggagcatgaataataaacatattctcttagtcatgagaaatagcctgagagtgtttcaataccatttttatgaagaacatagatttttttttttcccaaacagcaagttcacattttctccaaatgatatggtgaaggaagactgtagttgcatctataaaaccacccttaaaattataaggccagataaagacatttttctgttttaatatttagactatactctatgaattttgttgctgtataggaattttgtttcgggaggtagcagacatgaaggaaatgtttgagatggaacatcctctactaccctttaccctatcctgtccataacacacactcaaatgaagataccaaagatgtaccagacattgttcttaatatttttacatataaaacttttctaaacacttttatgtatatataaattactaattgaattcagactttacagatgagaaaacagaatcaccaagtaatttgccccaaatcacatagcaagtggttacgctgagtctgccctagcactgtccaataaaaatataatatgaacctcatatgtgatttcaaatgttcaatatccacatttactacttacatatatctgcatagtaagttgtgtctaaatttggcaacttaaaacaacatttctcacataatttatgaggttgaggaatcgggagtgctttagatgctatagttctgcctcagggtctttcatggagttgcagtgaagccgtaggcagggaatggagtctctgaagatttgactgtgatttggagatctattatcaagttcattcacatggctgttctgggaggcttcaattctttaccacatggtcctctccatagggttctcactgacttagtggtctgagagtggaaacaagcccaagactgaaaccagtcttctatggcctaatctcagaagtgacataccatcacttctaccatacccttttgatcacacagatcaatgctagtgcaatctgggagggcactgaacaagggtgtgactaccaggagggagaaataactgggcaccatcttggaggctacctagcacagatatctttctttaaaaattaaagaaaggtgacattaattttaatatgttttatttaaaatgtgtgtctaggatattatactttcaacaacttattgatataaaattatcgaaatattttacatcttttcatgctaaccctttaaaatctgatatatattttccacttatagtacatctcaatttagactgtccaaattcaagtagccacatttcaagtgctcagcacaatggctacgttaatggtacagtattggaaataacagatatgaacagtatgtataggtccagatttgtgttctgaagcacttcttgcttaatcatagaaaaaaaaaaagaggtgatatttttgtcaatcaacgttaatgccataataaggaatttttctactatatgcagtagcattgtaatgttaaaaagatttgaactaatatcactcctagaacaagaggaaacagaaatttttagatgaatgttagaaaatttactaaattcactaaatagaaaatttatttcatatgtttcatagatttaaaccatgtattaaaaacaagctttgggacgtgcttcctacttaaattaatttctaccagataaaaggatttcatctatcaagttgtcaggaaactcttaagtagccaggaagctactagggtgataccacccttccatgaattacatcactaaggagacagtgagcccgagttgcacagcaggcaggataaacttcatgtctcagaggttgtctttgacccccaagacccccaaagtgacacagggggttgctgaacacataattggggaaccctgagcttacaaaccccaaataaggggttgctggcgaactgccaacttttgccctccaagaaaaattatatttattaccttggaatgtaaaataattcctttgaggtgaggagaaagacttttctatcctagaatgtctctggggagggagacattctcttatcatttttatactagttgaaaagaaacctgctacctctagctcccaaggcgtatagaaatgctacggagaattctcttccaacatgactatatcccttaagccgtaagacttaaaaaaatcatttttattggacatgtgaaaaattcagaaaagtattaaaataactgatgacagaaattgaattaatagaattgtttctgtaagaaattaattaaggctaaatggctaaaatttataaaatctgctcctttatgcctgggtaccaaatatgtgatacattaacattgttaattctaacacattaacaatgaccattgtttcatttggagaattatatactccattaacagaaaatatgtattacattcaatcgtcattcattgtattttcatctactattgaaatgatcaatctttcatctttattttattattgtagctgatttttttatttgattaaaatataagtttctaaaggacctgataggaaaattattatgcaaaaaatatatacatttgctagctttaaataacctttccatcttctgttttttagggacttttgttaaaagaagcaaggaatgtaagtcagaagttgctactgtttttccatctggatgttatgataaaacatgactcagagcagccctaaatagagctcctgccttttagataattcgctatccaaggaatcaggggctatttttccaaattttctgggtcaacttctcttaaggtactatttcccactgtgctcacttaagcaaagtaaactcagctgtgtctaccttacaacatcttttctttgacaaaaaggggtattttgtataaactatgcaagaaaatgtgaattaatcagcatgcaaaagaaattcaggcttttaaaataattttaagatctatttcttggtctattttttttttctcttgctttttagttcatgatcagattatttctctgcatccttggtctttggataactaccatgtatattagccaaaagacaaacagcttttgcagttctaggttaaaatgattctgttactcatctatgtgcattgtaatatcagatcagaattctgtcagaaagatcattttaaaggaggctgttccacagctggtgctgttctataagttttcttggtattaatgttttatctccatcttctaaaatctatctcatcactcattgtccttaccatccgtctttcttaccggcacaattctaaaagctttttatgatgctaccttaacagtaccagcagggaaggattctcatgagaggaactagattgcccttaaacaattggatcttctgtttcttgcatcttaactgaacgttggtagagaacatttctataattatacacagttacattttggggatttagaggttttgccactggaatgcaagcagagtttccctatacttcctgacccccaacatgccatatatggcagcctcccccaccatcaatgtacaacactagagtggtacatttgttgcaagtagtgaaccttcattgacacatcatcttcactcaaagttcacagtttatatttgggttcatttttggtgttgtacattctatgggttttgataaatgtagaatgacacatatccactttgatagtgtcatacaaaatagtttcaccaccctaaaaatcctttgtgctccgcctactcattcccctctctcctctaatccgtggtaaccactgatccttttcctgtctccatattttgcctttttcagagcgtcatatagttggaatcatatagtatgtagcctttaaagattgacttctttcacctactaatacatatttaaggttcttacatggcttttcatgatgtaataagtcatttatttttagtgctgagtaatatttcattgtctggatgtaccacagtttatccattcacctactgaagggcatagttattacttccaagccttggcaattacgaataaggctgctataaacattcatgtgcaggattttgtgtgaagataaagaacccgagtttttaaagctataagatgtatttatttttctgttttacaagtaacacatgcatgttgtagaaaattagaaaatgggagaaaattcaggaaagtaaataaaactcactataatatcatcaccagactcatctagcattaatattagatacatttgtttctgttgttttccagtacattgtacacatgcatacatatagacacatgttttagcataatgggaaaaaatcttattctgaggacttgcctgtgtcattaaatattcttcaaggcataatttttattttctaggtaatagtccctcacatgcatattccataatgtattcaatccatcctgaacatggccatttatacaatttgtactgtgatgaacagccttttaaactaacattttgtctgcatttctgattattataataatcttatatacatagaagtaaaaatgtttttaaagatctgatacatattgtcaatcacatttcataaaggctctgctaatttgcattccaactaggaacttttgagggggccaatctaactgcttttttgagggtgtgacttaactgtttgtctttcccatctcatttttttgagttaatagcattataacaatttccacataacaacattcacctgattaaaatatacaatttaatggcttttagtgtccctgtctccatttttttagaaacatgaaattttaaatcttcaacatccttgaaaatggcagggcctgacagacctggcagagggtcacactgtcaacgatgccctgtagtcaggtaggggaaccaagatgtgcagtgcttaggtgagtcatgcaagggaagagttgttcttataagggtgtttgttttgacctatttaacttctttctagaattgcgagtaagtaaatatggccagaaattaatgaattaaaagacttttagaaatgagttgttaattggctgggcatagtggctcatgcctgtaatcccagctctttgaaaggcttaggtgggaggatggcatgaacccaggagttcgaggccgcagtgatctgtgactccaccactacactccagcctgggtgaaagcaagactccatctcaaacaaattgaaaattaaaaaaagaggtggtaatcattatttgcaaatagtaacattaccctgtaaaacagagtatcaaatgagacaaaatattgaaacttggtaagatgacaagatgaacaaatatgtaaaacaactgtatgtacataaaggaatatattcttacatataagaatacatatagttataattttccatttataaacacttagaatatataggggtaacatattttataactaactcatttatttacttaaaaagtattatacaagtttacttatttattaaaaaatagacgtgcttgaatcagaaaactgaatattataaatatatcaattacatatgaattaatttatgttcaacataatgcagaataaaatttccatattataatcataattattactatgttgcctcttgagagagtaattgtaaaaatcacttgggagaataaacaagtgaacatattcaagcaaatattttaaaaataggataatgagggagtacttgtcctgccaacattaatgtctgatacaaagttataataaatggtactatatgttgcttacagaaaatcaaaaactgcatcaataaattacttttacaatagtggtactagttgttatagaagcgtcacagcaatgtttttaatttgactctagtgccatgcacttaagcatttgtttatagctcagaaacagactttaatgcagagtattatttgctgtttgataaagtttttactgcacatctgggtttaaaggaagaattatttagtaaattgttctagtatagttaataatgtagcaaacagtagatcaaattggatcatcaacattataccatagcaaaagaaatttgaaatagatgaaaacatcacattttaaggaaaactatcttatgtctatatttgaaacaactttcaagttgcaaatataatagaaaaccataaggaaacaatatatttgaatacataaaatgaaactttctgtcataaagtaaaaaaatgaggaagaaatgtttaatagcaaaggaagataactcaatttttaaaagactaaatgtcactgaaatggaaaacagaaaaatcaataaatattctagtagaacactaataggaaaatggacaaagcttagaagaaattcaaatggtttataattgtgtagaaattagtttgtactaacacaataacaacttttccacctatataggtatctaagcttttgcatttatgaagttgggaaaaatattgtcaaagggtcactcttaaacctaactgaggagtgtatccttcctgaaaataaattttgtaatagattgagtagcttctttgaaaatacatgtaatatattttgaattccatctacatcttatgcatgtacagagataattattgatgacacaggtacatttagtcttggttctgccatcctggaaccagtactgtgctgagaaaagagcctttataatgtttaaagctttaactcagtgcttccacttgtcgaatcaactccaaagaaataatcattttagaattatttgtaataggaaaataatagaatcaacttaaatgcccaacagtgaggaatcgggtaaatcatgatacattccttacaacatattattcatctattaacaactatatttgtgaaaaatattgtaaagcatgaggtttattcggttcagtattaaatgagacaagtaggagtcaaatgaagtgtctatagtagagtttcgacattgtttaaaacatttttatctctctgtatatatatcaagttaaaaaatgtcagaattttaaaagcagctgtttcagtccagtgagaatgagtgattttaattttattttaaatttgttaaaatttttttgagaatatatatagatatatatatatgcatacatatatacacatactacacacacatgcacacagaaacacaaacacacaaatagaaatttaggctgggttccttggtgtgttttagtgctttgatttaacaatttcctcatatataaagtagagaaaacattaatagcatttatcttacaaaattcttcagaggatcaaataaattaaatgaggagattagcttacgacagaccatggcacataacatgtactcaacaacagtgttaatattgtttttctcattattattatcttttaaaaattttgggggggctcctctgtttcatgagccccagcatgggtaggccttgaattttctcattgcagctctattcttcctattatgaggtaacttccttctggctttttgcagtagttggtctattattcttagtttttgatgatatggtaagttttcatcgttttctatcattttctgtgtctttttgtgtatactttatattggaaggtcagggacggccatatccagggctgccagacagccagcatttaaactcctcttaatcaaacacaaaccttggaaaaccccaatttgtttatcttcagtgtctaaagtgatcaacaatagcagctccaaatgctgtgctctttcctggaagtgactgtctgggtcaatctctgaatagttttgaggcagttccataggagttacttgcacgagaccccccagtgctctgaagaaattcatctcagagctgttcaggtgttcgtgctgaccaggtaccaggtcaaagcttccagagaggaccgtcaggggccagtaagctcctgtccaagtcaaatccactgggagagttgtgggttagccagttcatgagcccagtgctgattttaggcaggattttcaaattcatgctgttgaagttagttttattgcctagtaatatggaaccaaaagaatgtgtttagagagaaaatgctcctttttatatactggtgaatttagaaaaacaaaaattcagttttctttattgtgcaaatcaaaatctatttaaatcctaagccctgacattcatttaatacttatggttacattgggaaattatagctctttctaatttgaatttaatgtaaactgatttttaattgttttgtataaccatgggtaacagatttttttgaacactgcatgataaaaatcagcaaatatgtcagacaaagcacaatgttacaaggaaacaccacagcatatgttgacagttatagaagaattgctgctgttttcacccttcacaccagaataatttcttcaatatttacctcccatgtgtagagagagaaacatatggggctttacataatcataagcataaacaggtggctacttaggtacatttaatttgcaggcaacatcaatactgaacaacacaatcagctccacatggctcccaaactctttctactaacattccattaacaaaattaagatcattaaaatagagggagggtatagtcctccctcaactggcttcagctacctttcagagtcatgaataaaacactttttcaaaaatgccttggcattttgctgttttctttgttcaagggaacttcagtaactgtgtataatgtataccttgtgaataacaacgagcagcataatatttgcatttaaaatgtgcttacatcttttattctccctctaatctgctcattatgggcataaaattatgatggttaaattctaagtaatttatcaaagcatggggtcggacaagctcctcaaagcaacctggaaatatttctccaaaggcagtccacctaaagaggtcacctgaggctcatttccatattcaaacatgctggtgaaatctgtggaaattatcattcctggaaatttttgctcaatctgtgccagatgctgagctgtagattccatatattttgttatctcgattttgatccaggctagaatatctaatttgtcctcgttggcattgaaattacataggtaccaatttttctgaccttataaccatcctacaatggcttagaatcccagggtaaaggcaaatgaggagacttaataaccactatgtttttaatcatttggtgcttactagctgttaagtactacctaatcatgttacctgtattagcttatttaatcaccacaatgactttatgtggtagatgatataatttttctcattttatgaaaaatgaaattgtagccctgagactttaaattctgaagtatacatgttaaggaaggggctgaggccagaattaaaacccaggctaataggaattgtcaagccataatcttaaccaccccactctagttgtgttccctttatcctgaaagttctactgcccaaaatcacctagggcctgggaatcctgaaaattctacctaaaatcacctagggctaggaacagcaaatatgtggtattgtgaagatcctcttaacaatgctttgtgagaggtttgggggtgcctaaggtctgtggaggttctttctagccctgatacctctatgtgtcttctcaaaacacaaggaacagtgctctgcagaactaatgagcatctagggagctgtgttgccatcaaggttatgaaaataacaatttctcacattctctctcctcatcgtaggtctattactcactctcgctgcctgggagagagaaagttttaacatgaacaagtgtatgtatgacgtgcggcacatttattaataagctgtgactacaataaagctttaggcctagatatcagattatatcatttgatcttaagagctaacattattaatatgtaatttgttaagcatcccaaatgtgttaggttttgcagtcactcctttcaaggagtttaaatgttactgggaaagtttatttgttttccccatgcaatggttgaaccaaagaggtaaaaatgaattgaaagattttatgatatattcttttacctctgcaggtaaaagcaatatgaaaaactattaatagctactgcagacagtttcaattcaattattattattattactattattgttttgtgatggagtctcactctgttgcccaggctggagtgcagtgacatgttctttgctcactacaaccttcatctcctaggttcaagcgattctcctacctcagccttcttagcagctgggactacaggcacgcaccaccacgcccagcttttttttttttttttttttgtatttttagtggagacggggtttcatcatgttggccaggctggccttgaactcctgacctcaaatgatttgtccccgcttggcctcccaaagtactgggattacaggcgtgactcaccacgcctggccccaaatcaattattaatgtaaagacatttgaacacaggcattctatagtctcacttagtttccctcaacattttaagaaacttcctcaccatcttagacatatgttctgccctcccaaatactcagttaaattactgtgtatcatttctttatcacacactttaacttcccccacattgcttatttctgctcttgaagactcttctttgaagattgttggagtcactcattagttgatgatgttcagtgatctataattgacaccaaaatctggagactcttctcagttcagactattattattttatattccaatactttgaggattttgaactttttgctttgatagatttatagaatataccaacttaaacatccttgttattatatatttgtcatatatatttctcatttcacatgtttcttgtggcttttctatcactgtgttacattcccaagacaaattttaggttggtatattctacaaatgtatattttttaagactaccccaaatccagtgtttccattagaagttctagctcaagtatctctattcatctttagattgaaatggtgtgcatgaaataacctatcaaagccttcaaagtaggaccagagattattattgttcttctcacaccatggcatctggggaaggctgatccatgtaaagagagggctggctggtgagacccataaacatgttattctcatgagcaatgtccttgtaagtcatacatgcaacagggaggcaagactggcttggtggcaggatgcaaaccttggatgtcaaagctcagattgagattccagagctatgactaccagttgtaaaaattgtaactattttcatatccccctatagtaataatatttctttcattgtcctcaaaagattattgtaaggataaaggatgcatatgaaaaagttttcaaacttgtaaatttctaaacaaatttcagttgttgcaattactgttaataacaactgcaaatcattaagaatgggttaaaaatataaactcactcaaaacctaagattcaaggaaaagacttgaaagactacattcatttattaattaatttttagcaggtcaatctattacatttcccatgatttatgttagttaagtgacgtgttttttttaatgaacaatgtctcctaattcaaaaataacaataaaatttattttgagaactaacaggccaggtgtgatggctcacacctgtaatcccagcactttgggaggctgaggcgggcagatcacctgaggtcaggagttcaagaccagcttggccaacatggcgaaaccctgtctctattaaaaatacaaaaattaactgagtatggtggtgcacacctgtaatcccagctactcaggaggctgaggcaggagaatcacttgaacctgggagtcggagtttgcagtgagccgaaattgtaccactgcactccagcctgggagacagagcaagactccatctcaaaaaaaaaaaaaaaaaaaaaaagatctgacaatcctaggtggaaatagacatctattttcatgtgttaacttgttttataaaggttgcatattggcttattttaataacttgattactcaagtcttggaatgtgtcttgtctttctttggaagaataacaaagcatatttttcccagtataaaacgattgtacactttgagaaaaagatgaaaaaaaagttggtcacatttagatctaatcagtcccagtggtgctttagtttatatttaactttcttcattgtgaaactgaaattccaatatggcatcatattaaaacaacaactacaacatgtcctagtttttatggctttcaatggctgtttttaaaaaggaatgatttggattggctgcaatagtatatgaagagataagttaatcaaatatttttcctatattgtgccactttagtatgctaaactgtgtacttcatcatcttttaaggaaaagcacagattcacagacacatttttcttgcaatagagacatccagcaagacagctctgaatagtgtgattaactgaaataatgatgacctttagggttttagccttttcctacttcataatattttaggtctgttattaccttaggtgagctctattccccaagaaagatgacaccaaattaattcttctgtgacttatgtcatcgatatagctaggataaaaataaaactatgtgtctctaccttttatgagattttaggtacgcattttttaaaaacttatttcacaataactgctgaattttctataccctcataatgattgtggactcttagaaataaatcttcacacacagacaaatgagattaaacacacacaggcacgcgcacacacacacaaattcatttactgtggtgaattcaagaacactattttattgaactctccctgatacaggatataataaaatgagaaatcccttcaaagtaaatgtgtctttcccttattttagtcaagcacagcatacagtgagtgaacactattctatttctaaaagtttttaggataggttgcatttgctaccttgctcattcctgccaagattgcatcagtcacagtttttcaggaagtttatatctaaaaatcaccaaaattccttttgtttgtatgagtaaaaatgacttcaaaaataactgattaaaataatctttgaacagtaaccaaaaatatacaaaaatgacactataattggctaaaaatgatttgatatatagatgaatttcactggaatacacttgttgacaaaataataaatgactttttgaagctatataattttactaagtttttaaaaatacactatcttcttagagcatgctagtatataatattattaattacttttgggttaagaaagcaattaactaatttcttctttgtcctcattttctctggaatttattaaaatctattcagtaaatgcatttctgaaagtgatacaaagcagttgctcccataaaataaaaataaaataaatcaaacagaaccacttagacatacaatgtacaaaaatctgtatcttaagtagtaaaattttattgtagtagttggttatcttgatggagacaacatttcaaatactgaaattagtgaaatagatatcaatgaaatagtaaaaatagtgcagttttctaatggaaaaattagagaagtaatgagagaaaatgagaagaacaattgacatatagtcaagagcagtcagtccagaacaactacagaacctggtattttcaaggagggttatgtgatatattatgttgtgatttattaatgtgtgttttccacaagggttttataatcaaagaaatttggtaaattctgcatctcatattcttctcttgagagtcatggtgtatttaaagtttctgagaagtcttacattatttggacctatgcacatactttttcactgtggtaaaatacacataaaattaactttaccattttaaagtgtacagttcagtggctttaagtacatttggaatattgtgcaaccatcactgctatctatctagtccaagctatatagcttttattttttattttttattttttatttttttttgagagacagagtctcactctgttgcccaggctggagtgcagtggagtgatcgtggctcactacaacctctacctcctgagctcaatcaatcctgtcacctcagcctcccaagtagctgggactgaaggtgcacgccaatatacccagctaatttttgtattctttgtgtagatggggttttgccacattgccaaagttggtctcaaactcctggcctcaagtgaccctcccacctcagcctcccaaagttctgggattgcaggcccagctatatagcttttaatcatgaatgtgactacaaatcagttccctttgggaatatcttttaattttagtgtgtctagagaatatattcataaaaaagctgaccaaatccaatcttctcattttaaaaataaaaaatttaaaatgtgactgagaagtaagatgccttgcttgggatcacaaagtagttggaacagagccagtgtcatccagatttcccatttccaagaacagtttcttttctatttcaaggtattttccccttgtctccatttgtattgtctggtcttatgatctagtgatctataagcaatacttcataattttacctagaagaactctggattaaaataagcatctctaatctttaaaaagatatcactttaaaaatgtatgcagtacttgtgttgtaactctctccttgtgattttcttgtgagaactttcattgtaagaactctctttttaattcacgtaattctgttcttaggtctttttaagattgtggctgataaaactccataccttactatggaagaaatcacaaggaccattcatattggaccaagtagactagggcatccttgcttctatcatcagaaggatataaaactagagaacctcatcataaagcagggtgagcaaatcatgctcaactcagttgaagagattgatggagaaataatggtgagctgtgcagtagcaaggaatcatcaaactcactcatttaatttgcctttgtcacaagaaggagaattctacgagtgtgaagatgaacgtatttacactctaaaggagattgttgaatggaagattcctaagaacagaacaagaactgtaaaccttacagatttttcaaataagtgggactcaacgaatccatttcctaaagacttttatggtaccctgattctcaagcctgtttatgaaattcaaggtgtgatgaaatgtgagtatccactgagaatgatgttctatgagcatgagcattatggggtttgggaaagaaagattttagagcctgaagaatgggagtctgtctttatttcaactattgagcctgtgagagttagattcctcatcaatcaataagcaaaccatatatttgctcaaaagatcatattgaataatgaatatacaagtatgttgtaaattgtatggtgctattcacatatgaggtgctataactatcaggaacagacagatcaaactactaatttatttttattactgccagttaaatatgactagaaaagagctacttttaaaaaatagaacatatttagttagaatgaggctttcttgtatggaggtggtcaacaaaagaggtaaatatgcaaagtttccttgatgcatcccttacttctatttttctgacagtctttttctttttccagccatccattattggctgtaaatctctactaacccagagcccctctgtcttaagggaaaattatatgacaaattaattcacacataggcgtggtgtttttgtttgtttgtttttttgttttgagacagagtcttgctctgttgccaggctggagtgcagtgattctcctgcctcagcctcccaagtagctgggactacaggcacccgccaccatgttcagctaatttttttgtacttttagtagagacagggtttcaccatgttggccaggatggtctcgatctcttgacctcgtgatcggcccacgtcacctcccaaagtgctgggattacaggtgtgagccatcgcgcccggcccggcgtgttttaatatgcaatcttcatagaattatttgcattttgaaatacgaatatctggagagagcattgttacttcaaaggtgttaataccttgaattttcaggattatgacacgtgagtaggatggatagtaaagagttctgaacttggagtcctagattctaactctgggtcaataacttaataggtgttggttttcagtgcaccatttaaactccctgtttatgcaaagaaaatgatgatactcttttgcctaccttttcaagtagttttgagtttttagtattacaaaaaattgaggcaatggcaaattgtagaccccacattaatgtctgttagcgatccccaaatgtgcagttgagatgagtaattgagatttctttgatttttataaataatagatagtattttctcattttaaaatttgttattttctacaactattggcatctcctgcctatcgcatagttacaaatgagggtaaacccagaacctaagcacatggataaagtggttacaacatttaataaattaggaagcaagaaaaactactccgaggaaatggcatttaaatggaaggctcaaaggatgcataggaggtaatcaggcaaagaagaaaggaacaaggttggagaaggcaggagtggtattggggaagcaggtgaggaagggatgggagctctagtgtagttggtgtgagaaaaaaacggagagggcaggttgaaacaaatatgaacacatgcaatggggagtggaatcaatcatggagggtcttgaagtatatactaagaggctaaaatgtgtcataagggcaaatcagtaaagtgctttaagcagggagagaagaacagaggagagtagtgaggccagctgagtgccagggtacaggaaatttatacagtagagacatcaatgggaaagacagagaatcatagttgggcttgatgggtatttaagaagtacagagagcaaaatgtgaagatctattggaaggggaaaaaagccaaacttgttcccagcctcctggcttgatctactggatggaagtgcagtctattgaatgtaatcatcatcagatcaggggatattaacatatttgtttaggtaggacttaactgtgaatttatgttaaccaagaccgagaagaaagcccttggttgaaataataccgtttacaaaatgttttagtctaattcccattctttaatgctatttaaattaaattcccattttaattatactggatcgttaatttcatagggattattttaaacatagttcttattgtatagcaatttcaggacagatactgcctgagactggattgcatgtgtattgactgcagaatattccttggaaatagaggaggggtgtcttatcacaaatacctaatttaaagtatttgtattgttgtaggcatttttgccctgcatataaaatgtagaccatgttttgaatccattgtggttgttttacatgattctttcttaaattgaagattcaaaattgccttgacgtcaagaaaaagagtaggtctgagcagggaattggaagttttctagaaaccttaggggaaagagcaagatgaaaaatactgagaactacagggagccatgtttgctgaaaagagaacataacaaataaatagagataagagagaatataagatattctactcctattactagtttttaattattaatgtgaatatttgggcttcaaaaaaaaaataaaaatgtttaaatgaagtatttgtttctggaaacttggccaaaatctctgtcataggtctgaaccccccaaccctcatcacacatttaatgatttagaaaaaattatccctctttggaaaatagatacacataacagtgcaaacttcaaactactagtcttatgtaagtcacatcatgatgtgtattgtgcctttctcaggaagacaaaattcatattagcatagtaaatggaatacataatatttgcaaatgaaaaaattgagtgagctatttatatttgcctctgaaagagagaggtcttgaccattaaaacttttaaaatagtgtcatgttttgacatatagattgataattatttcttccctgagtgaaaatttcagagttgtataactctctttcttttttgaaaaaatctcaatgcctctcaaatttgggaggtatggttttagcccagatatgtaaaaaattaattcattttataagcaaagggctgaaatcacacaagtgaaaagtagtatcagaacagttgtatctgcatattgtataatcagtgatacatgaatagcagaaaaataacactttggtctttagaatactgagacttcctctttctctcatttaatttttaaaaataattttaatgtttatcaaagtccaaaaagtcaaatagtgaaaagaattataacaatgttatcagcaaacctttatgcccttgacacgagggccaaattttcctcatattctgctcttctgaggtaatgcctttaaatatttttcccctactttctggcacatatctaaataataaaggaatattgctctttttcaagtcatcaactttaagatagtaactattgactttcacatatgacaatgaagacttaattctcttatattcctacttccccttccctatattctcagtatattataagttatggctaagcattaatattttcattattgtgacaattcactgctcaaccaagtggtgtataacgagtataattccatttctccataactgtttttctgcgatgacgaccttatcgttttctttgcttgattttcttcaattttatcctaagtcttagagcattcttcaactctataaaaaaaggccactcagtgtaatttttcaaagaacccaaactatcaggaaggctaccttttctattaatttattttcctgaatgtattcctttgtaactcttcgttctcatgttccaattggaattgcttatttttgagaccaactgcataggtgctgccctgggaattccatttaaaataatcctggtgattccctgttgacttgtgtctgtgttgactagctatttctgaaatcaaataactccctctatcttgactttcttccaatttttatgcaggccaaccttcccttgcttcctgagaacggtgcatgaatgtttgaaaaatattctatacacatataagattgatagtttggctacttacagaattccaggttgagaataaattcccctcagaattttgaaaactttactcccttatcttccaccatcctgtatcgtcttggagagattatacgtggtattctgaagtttcacagtaatgtgacttggggtgggtctgttctttcttagtgatgacagttttcaatctgaatatttaggtgcttcatatttggaacaatttctctgataatgtccactcaattatattttctcttctctctgtctttaatttcaaatctcatactgaaattcccatactgatcttctagggccttttttcttttctattttatatctttttgtcttttgtttacctccagggaaaattttcataactacatttccaactgttttaatgaatttttaattttcgttatcatatttttaatttccaagagttatttcttacatcattttacatattttacactgttcttgtttttaaaatacatcttatttctctgagaatatttcagttagttttgtttgtttgtttgtttgtttgtttgtttgttttgagacggagtctccctctgtcgcccaggctggagtgcagtggcgcaatctccgctcactgcaagctccgcctcctgggttcacgccattctcctgcctcagcctgtcaagtagctgggactacaggcgcctgccacccggtggctcacgcctgcaatcccagcactttggggggccgaggcgggcggatcacgaggtcaggagatcgagaccatcctgactaacacggtgaaaccccgtctctctcaaaaatattttagatagtttttttaagttttcaagcgttcactgcaaaatatcttcctcttttggggttcttttttttttaagttttggtgtatcatttcttattaaatgtttttatcaaatgctttgtgattacttgtaatatgttcatatttacaggggtcagttgaaacaaaaatgtacaagtaaggcactgtttctatataagctctgtgtttatgaattttagatattatcctgccaactttttcactgcagcattcctcaaatttaggttttgtgagtctttcctttttgagttcagtttcacctaagaagaatctttgtggtatcttctggggattatgaaactattggagctacgtggggacagagctaaagatctcaccactcccacttacagatttataattaactccttcactttcagttccacgcttccctcctgctcacctatgtctggtttcggaggttctgagatcctgtatatactgtttcctgcagagggagaggtggaagaagtggtcacctatctcccctagattagagtggagacctgggtttaaccattcttcagacatttgaataatccctgtgtttttagcctcctggcttcaccttgctttccaggggtcttatgtctccaaattctatctttggaggtcttatgggacaacaacagttcatttttctttggattttgcctcctcaggcacataggcactcctttttctattctgtcaagtaatttatcattcttccctctgatttctgtcttcatttagattaaggattgcagatatcttttagattcattgaaccttttttaaaaaactttcttttttgacttcttacccctgtggtaaatttgatgggagaaaggattgaaaaggtataattttagccctaaacctcactacctaattaaattagttctagcccagagttttgcctggatctattataatctctcaaaggactggttgctactcctgctaaatgataataagtataatttataaatttaatatatttagtaaaacacaattttcattagtttataaaaatatcacattaatttcttatgtatgtatttgtatcttctcagtgcttgagatagagtaaatgttccataagcattcaataaatcaagtacatgaaagaatgaataaagcaagtaacacattgtttatgcgtgtatatttatgtttcacagtacaaagctcctctttaggtaacaagggggttttctcactcactatatccagatttgacttattatgatgacatatttatgagttcaatagctaaggaaaatatgaacttcatggtaccaaagtttatatcatttatattcatataacaggttcaatttttgttagtgatgcttttcgcaatgtgtccatgaaaatactacgacaacatgacatttagaaccagtagatactctagtcagctcccatttcattttgttcctttaggctgcagtcttattgctaatagaaatatcatgcagctagcagaggaaggtacctattttgtattatgtatatatttatttttacattaccaactattaatgccttgttaggattttccagagaaaaagaatatctatgtgtgctaaatatacctaattatacattaatatatacagtgtttatttgtatataaaacaaattgtatgtaaataaaaatatttgtttattttaaggaattggctcatgcaagtatgggagttgaaaagatctaaatctgtaggacaggctgcacaggctcaaaactcaggcaaaagttaatgctgcagttttgagggagaatttccttttctctgggaattctcagtttttgctcttaagaccaccaactgattagatgaggcccacctaaatcatggaaggtaacatcctttactgaaagtcaactgattgtagatgacagctacatgaacaaaataccttcacagcatcacctaggttagtgtttgaataaataactaggtaatatagcctaagcaagttgatatgtaaaactaaccattacaaacatcaatgggatacatgttaaaagtgtctaaaaaagtgtttatttgcttttcttagattttatggactaaattaaaatgtaaaagtcaaagtagtgttacaaataaactcatatcaaatgcaagtgtattcattttaaataactctcagtttctcagtgaggattatgattattttttctaagagttacagagccgttcaaaaggctctctttgtttagaaatatggacagcagatgaaccagaggagaaccaggtaagaaaatagaaattcacagtatagctttccttaagttgaaataaagttaaataaatttaaaaaaataatttgcagaatatccataaagaaaattgagatcaaatgaatgaactgtaaagcaaattttaatttaaaagtctggaacaaggcagagctcagaaatttttagtaaatctaataactgccctataataaggattgtaatgcaatgcaaatatgtaactaaacaattcattgagtgggtgagagatgaagatgaagttcatacttttgagaaaaacaactgtagtcttagaaagtaaatgacaaagattaaacagtaaaaatgtctaacaaatatagagattattattattaaataataatggaggaactagaagttgggagaaattgtagcactagaatttataaaatttctttggagaaaaatatgtagaaaccatcatcttgtcctcaagtcttgaataagagtgtctcagcagatttccatccctgtactaatttaggtccaattgcaaaggattggttctcacttagtgagttgagaccaagagtgttctagaattgaatattaaatatccagggaaacatatgttgcccatcaccaaccaagcttaaaggtaactctttattttctctttaaagacaattttagtggtgtcccctaaattcaaacttagttaagagggttgttacagtggcaaatatagaaaagcaccacattatgattagcattcaccctgtgaagggactttccctgaaagaacttagtgaaacaactcagcaacataaagaagtaacctgttactctttcagaaaaaatggaatggaaattgtttttcacaggagctccctttggataacaagaaaacatacccagcaaggataattcatattcactcacaaagaaattctgggaagtctaaactaaagtttgataagtacataatgtttttactttggtttagtttggaacagaaaaacttgtaatacaaacctccaggaatgtttctcagtctcatgctctcaggtgttgccttcttatctaacattttagagtcaaaaagaacttttttggaaaatgacattttctaatttagcttgtactctttggtcttttttgggggaggaaattccattttcccaattgtaaaataacaaatgcttgtttaaaaaatttatctctctctctctctctctctcacacacacagacacacacacacatgattagagctatatataccacaatataagccgttgttgtctaaaattttataaatctataaaagattctaattgtttttcctctcttatattttaaaatatttctataaaagcatgcaactttttgttttataagaaaaacaacactataagtgttggtgtctttatctttctctaggagagattcttagatataatatttgccataaaaattaatgaaacctatttcagtttaaaaacttgaggatgtcattgccaaattctaggtaaccttaagcaaataatgagtttttattttaacttttgactgtggaaaacttaaaacatataaaaaaatcaacagaatagtataaaaaaagctttcattttaatgtattagcagacatgagagagtaatataaaaattcaaagttcatgcaaaaataatgaggcagattgggttgccagtaaattggatgtctatgggcttcatggcacttagtatagaaagaaaggtagactccctgatttcaatctcttctcccattgagttatcagataatctgccaaattcctaattgtaatttggtctttcttaatctgaaatattttggatttcctcctgaagtagttatacattcctcagcctggcattcaaagtgtcaattcatttccatagtgcttctttcagtgagtctcctgtccagtccctgtgctctcatttaaaatcctgagatgctggatttctttttaattactgactattctcaatttcccttcttatcattgatcacggtgtccttgccatctggattataccctctcctattctatcttagcctgtaatttcttttcattcttaaagtctcatgttgtggccatgcctttcataaaatgtctttatcctcatcatcaaattaaatatgctatttttccccttctttttctgcctactgtaattttaattgaggcttttatgtgattccactttctcttttctcttagcatatcaattatactgtaaaaaacatttttagttgttaccctagagtttgtaatatatatttacaactaatataggtcactttcaaatagcacaaataacgtcatgagtactgcagttaccttataagaaaatattccccattcctccctcctctctcttaaaacagtactgtcattcatttcacttatctgtgtgctataatcatccaaaatattgctacaattattagttttaacagactgttttctgttagatcaattaagaatacgaaaaataaaacgttttattctgccttcatttattctccagcactcttcctttctgtgtgtacatctgagtttcctacctttaacatttttcttttctctgaagaatttttttagaaatatttcttgcaaggtaggtgaactggtgacaaattccctgaattgttactcacataagtaagtctttatttctcctttacttttgaaggatgatttcactggatgcagaattctaggttggtgggttttttccaactctttaaatttgtcactccattctcttcttgcttgcatggtttccaaagaaaagtccactgtaaatgttgtgtttttcctctatagataaggtgtttttgctcctctggttcaagtttttgctttgtctttgatttgaagaagcctgaatatgatactcttcaatatagattttttttggtatttatcctgcttaatgttttgaagctgcatttattttggaaaattctcagtcttgttaatgcaaatgtttcttttaccactgtattctccttctggtatacccaggacatacatgttacatcttttgcagttgtcttacatttcttggatattatattatgttctatttttttcatttctttttcttttttggtttggtaagtttttaattgacatatcttcaagctcattgattctttcctcagcagtgcccagtgtaatgagaaacccaccaaagactttatttctgtttctgtgtttttaatttctttcttttttttttttttttttttttttttttttagacagagtctcactctttcacccaggctggagtgcagtggcatgatcttgggtcactgcaacctccacctcccgggttcaggcaattctcctgtctcagcctccatagtacctgggactacgggtgcatgccaccatgcgcctggctaatttttgtatttttattagagatggggtttcaccatgttagccaggatggtctcgatctcctgaccttgtgatctgcctgcctcagcctcccaaagtcctgggattacaggcgtgagccaccgcacctggtcctgtgtttttaatttctatcattgcctttcagttttcccctagagtttccatctctttgcttacatcacccatctttccctacatgttgtcccctttttccattatactccttagcattattattaaattttaagttcctggtctagtaattcccaaatatgtgctatatctgaatctggctttgatgcttgatttgtctcttcagagtgtgcttttttgccttataatatatgttgtagtttttttttttttttgaaagccagacatgatgtttcaggtaaaataaactgtgataaattgtcttaacttgatatattatgtttatctatctagaagttaggctgtgtttatagtttactataatggtaggtgtcagaggctacattttcatgtagtgctttcttttgtctgccctgttgactttagtctctagagactccttcttaggtatggtcttaaatgccattctttgagttgtagtttcctgttattatacaggagcactgttgatgtggtcgtatgttatggaggggggatttctataatttatgattaggtttcagttattagtgagcctgtgtctctaggctgtgaccttcacaagtgtttctcagcttttttgtcccctttgggagagatagaatggctagtggaggcttgagttgggtgttccctttcctttatgtagaagtacagagaaggttggagttgggtattgctttttccccacatagaatattagaggtggcttggttgggtaattcccttcccccatgatagttagtctctggtaaagcacaagttggttaggctgtgctaaaatagttttccttgaggacaggcattttttaaggagaacagaatgctctgggtatgtttcagaatagttgcttcttctctcaccctgccagaagcacaaggaaatttgtctcatcttcaccctgagaacctggatgggcccctgaaagtaagactcagaaaagtgtgggaggccctcctaaacatactccccaaccctaggagttttatctcttaaacaattctacctttagtccccagttacccttctattcttccaggtgctgcctccagcagtcgtttttgcccccagtgagctatgactgtttgtatttgcctacctgtctagtttttggggtggtggtttgccctgtgacctcaattctctggtgaatctaagaagagttgttgattttcactgcatctgctatttccttgtattgaatcttctctttaggcatctatatcatgattttgcctaatcttttttattaaaaaaacttggatgaaaatattttactttgctcatatatttataccttgatctctctattatgttgaagacattaaatacaagtatttattgcattgaacaggccattgtttaagtgaaactgcaaccttaagagaagtgtcttaaataaaatatacaatagctgctatgaatagtagcaggagttttaacatagaaaacttttttttccagtgaaattttatatagaatatatttactgaattgcttcctttagtggtcactcatggactttgttctggcaattattttttattcattaattcatttattgagtatctactatacgccaggtgccactctagacattctagacattgatgaagaaaacaatgaaagcctcccacctctgggaaggcatatgtttcagtttagggaaacaaaaatagaaaatgttcataatataaattaacaagttatatggaatgatagaaggtgaagggtgacatgaaatagagaaatagaaaagggcaaatagaagagaagattgcaattttaaatagtgcatttagagtaggtctcactgccgagatgatatttaagcagacttgaagaagaagaggagttggctgtgaacatatctggctgaagtatgtaacaggcagaggaaacaggctgtgcaaagatctgactgacaatgaggaggtccgggagacagcggggagttagagtgagacaaaggagtagcagatgagacccaggtggtgccaggggccaggtaaggactttggcttttatactaagtgaaaggactgacactgtaggcttataaacagaagacagacataaattatttagcatctaaaaataatatttgctttccctattgagacttgactgcaaggataccggttagaaagccactgcaacaatccaggcaaaagacaatgtagcttagatcaggatagtcctgatgtaagatatttcaggtgttaaaaaagagaaaagctaaggatgtctctgagatttatggactgaactgaaagaaaagagtttccaatagctgagtctgggaagacagcatatagcttaggttttggaggaagattagatttcagtttaagcatgttaattttgagacatctattagatgtccaagtggagatctgaagtagacatactgcattcaggaaaatgttttggctggagctatactttgggtagtcatcagcataaagatgatatttaaagacatgagaccacttaagatcagtgtaggcgtgggtgtagatagagggaaaaagagaaccaagacaccctaaaaggtgtgtgtgaggggtgggtggtgtatagggagaagaaatcagcaaaactgagaagaatcacaagtgacataaggggaaagcaagtgagaaaaatgtatcaaagaggagggagtctaatccactttgtcaaatgctgctgagatcttaagtaaaataagataggctagcatcatttcagtggatttaggcacagaagtattgaagataggtcagtaattgaatacaaaaaatttaagagttcggataacatggcctgtagggtttctccagcagcaataaagtcctccaatgcattaaagctattcccagcccacagcacccaccatgtacaaagacagattgggatctagcttgtattgaaactgatgttctggtggatcaattctgagttctcaggaagtccttgatggcatctattctactaatctctagctcttccctagacttgaggaatagcatgagcctatctagagctagctctagaattcttaaacctagctcattttgattcaaacaaccagaattttagtttctaaacttaccttgaggttcagggaagccagtaggtataatgttaaaagttagtgcatgctaaactttataacataacttattaatgtaagaagtgctctttcaaccctccttttttttctaaaaattaaaaatctttacaattttgcagatctttagcctataggcaaccactgattttttattttttttacaagaaaataatactttttccttgctgcatcttcagaaactctataattacacaggacatataagtaatacataaatcacacaggttttttgatgctgcataaacagttaataatattaaaagtaatatatgtaatgttttataagaggatattctgtcttctaaatattccaaattgttcattttcaaaagcatggaaggaagaaaaaaatgacggaagggtggctggagatattgaaaatcaatgccatatcatgaaaatgctataaaatttatgttagtaaattatcaagaaaatatagactattataataccctgttaatattaacacataactttattatttttttttatttttatgttttgagacagggtctcactctgtcacccaagctgaaatgcagtgggtatgatcatggttcactgcaacatttgcttctcaggctcaagcgatcttcccacctcagtctcctgagtagctgggacatgccaccagattcagctaattttttctaatttttgtacagagacaaggtctcactatattgcccaggctagtctcgaactcctgggctgaagcagtcctcccaccttagcctcccaaaatgctgggattacaggcataagacacagtgcctggccaatacataagtttattaattcaggaccatttataatgataagatgttgggtggtatatgaggaacaggtaaataaatgcaggacaatattttaagcatctctgtagtctcaaaggaagactcgtgagacagtggatgattggaaaaaatacagatatccattaaccccagtgacgcatgaggcaatgaatacattggtgagtactcaccagcatacctagggctcttgaatggctcctctgattgtgacccactctgcaccactcctttggtaggcaggtataatataacaccagtggagaaagaaagaactttgacattggaaaaatattgcatcttggtatttattttcgcatattaatctcaagtagcttgtatcttaggattttgcaatattgtttcaactcacaggatatgatttggtataaaggtttgttttgggtcaaaactgtcttctatgataatttgatatataaagtctggccctcaagaatatgacttaaaatgacctaataatttataaaccttcatataaaatttatgaacacatttacatacatattcacacacatatctatattcatgtatgttatggatgataaaagtataaatataagcacaggaatatttaacatgagaatcaggacagtgatcgtacgtcagtagaagtgaggatatgattttgaggaggttccctagagctccaaggtactggctaatgtccgcttcttaaactgagtatgggcttatgcgtgttggttttatattcaatctctttcatcttaaaatttgaaaaaaggaaaatcacacataagaaatgatatatgatgatcatctgagttctttattttgtaaaagaaatttatttatggcatcaggagagtatctcacagcaaacgttttgaagtacaaaaatatcatagtgatttattttttctttttagttcgaaaagatataatccgcatcctccccagtctagatgtcgaagtcaaagacatcactgattcttacgatgctaactggtttcttcagctgttatcaacagaagatctttttgaaatgactagtaaagagttccccatagtgactgaagtcatagaagcacctgaaggaaaccacctgccccaaagcattttacagcctgggaaaaccattgtgatccacaaaaagtaccaggcatcaagaatcttagcttcagaaattagaagcaattttcctaaaagacacttcttgatccccactagctataaaggcaagttcaagcggcgaccgagggagttcccaacggcctatgacctagagatcgctaagagtgaaaaggagcctcttcacgtggtggccaccaaagcgtttcattcccctcatgacaagctgtcatccgtatctgttggggaccagtttctggtgcatcagtcagagacgactgaagtcctctgtgagggaataaaaaaagtggtgaatgttctggcctgtgaaaaaatcctcaaaaagtcctatgaggctgcgctgctccctttgtacatggaaggaggttttgtagaggtgattcatgataagaaacagtacccgatttctgagctctgtaaacagttccgtttgcccttcaatgtgaaggtgtctgtcagggatctttccattgaagaggacgtgttggctgccacaccaggactgcagttggaggaggacattacagactcttacctactcataagtgactttgccaaccccacggagtgctgggaaattcctgtgggccgcttgaatatgactgttcagttagttagtaatttctctagggatgcagaaccatttctagtcaggactctggtagaagagatcactgaagagcaatattacatgatgcggagatatgaaagctcagcctcacatcccccacctcgccctccgaaacacccctcagtagaggaaacaaagttaaccctgctaaccttagcagaagaaaggacggtagacctgcccaagtctcccaaggtaaggctatggttttgcaatgttttctctggagtgtgttccttcaggcaatttgtttcaagtcttttctgagtgtgttttgcttacttttctttctttcatgccatatttgcaatgagcttttctgatgtgcagtagatgaatgaacatcaacagtgtgtaagctgttgcagcgttttatattttgatgtggcatgaagtttaatattgaattggaaatagcagagatgacatttggatatgatgacccaaattgccttttcagtgggttttggtaattaagaatattttataaagtgccttagaagcaaacctcttttattttagaagttctgttaatttttttttctaagtaaaatttaatacctcatccaggaaattaacatacagtaaactcccttcttctggggatggggggttactggtagcatgcatctatagcacatgtcttcattttgttttatgtgcagaaagatgtaaaaatatcttggcagaacagtgtgtgagaatgtgagcatctgcccacattctgcttatcttagaatcgtaatctttaacagctctattgaaaaacaaaatcaataaaattggagacagtatgaaatcattacagaatcaacaactccataaccactctaaagattttggagggtgattcagcttcatttccacttgaggtctttgcctcttgaaaactgccttctggctgcctgcaaagcgcttgcccttacaccatgatgtgtaggtcgtttatccagacgtggttctgtggtgtgtggaaggagtgcattctggtctggcagatgttgtacttgcagcttggggaaacaaagcaattagtaaaacaaagagaggctgtgtttactctctatgcttagaaataatagcagccttaggcttcaagtatatggatatggaaatacttttatttctacatctcagatattgcattctgattgtagctagggaaatccagtaaggatctccaaaagcatctttagaaaaagataaaaccagcagaaattttcttcccagacaaacagttttgaaagagtcatttgatataatacaatgatttccaaataatgttgattaacgtgttgctattgttttgaagggtatctttggcttctcccatttaacatatttttattactgaactgaatagtgagaaatgaaatgagaaatgaaatgtcttctttgtgttttagtggtaggcagaataatttccccctcactcaaatatttatatgcctaaattcccagaacctatgaatatgttactttgcatggcaaaagagactttgcacatgtgcttaaaattaaggacatcaagatgagattatcttggattatccaggtgggtccaatttaatcacaagagtccttacaagaacctttccagataagatcagggttagagggacatgtaactatgtaagaatggtcagagatccaacattgctgcatttgaagatggaggaaaggaatcatgaactaagcaacacaaatggcctctagaagccagagaagacaaggaatcagattctttcccagagtctccaggaaggagtgcagctgacaacactggttttagctagtgggacccacgtcagctactaacctataggactgtaaaataataaatttgtattatttaagccactaagttgataataatttattatagtaacaatagaaagataatataagacatcaagttgagaaggaggaatacttaaaaaccatagacagtcaaatctatatgcaagtcactacctgttttgctggaaactttttgttgttgttgttgttggttttttttgttgttgtttgtttgtttttgctttaaatgaatttattagcacatgtacccatagagcacttaagggtacagctaagcttcaggaataattggaaccaggatcttgaaaacagcctaagttgtttttacttttcattacatattggctttcttttcccaggcaaactttctcagttttttttttttccagcctactgctaagagttcctgcatctcacgtctcattttttcatccctagagaagaagataatctctttggctcaaaatttaaaaatgaaagggccttgattggattaatgcccatctcctgactcaactaatttattgcttactccaactagaggcacgattggagggtatctgtttgcgctattataacataataccacagactcagtaattcataaagaacagaaatttattgttttagagctctggaggctggaaagtccaagatcaaaatgccagcaggctccatctctggttctgagatggcctcttattgttccatttactggagagaaggaatgttgtgttgtcacaaagcagaagtgggggaactctttccccaagcccttttcttagcagcattaatccattaatgagggctctgcccacataataaaaacacatctcattaggacccaccttccaacaatgttgtgttggtgattaagtttccagcatatgaattttggagggaataaaatatttaaaccatagcagttgggaggagaatgaggtgtggttgcctctagtatctagcaatacagaattgcaggatgtgaagatatggagatacaaataatagatgtccactaccatcagaaagaaagcactcatagggaaaaaaaaaggttaaaatttttaaaaattgtcctttgccaggcattaaatgaaaatgatctaagtgttttattaggagagaaactcacagaacaacattacgcctagactactaaactgaagtgaatgaaatctttgactaaacctgtacatgtaggattccagatacttaataattcctagctgtttttttactggtcagaccccacatggagtcttggtgttcaattctgagtctcactctagagacttttaactggagtttgtaaggagctgttaaagatgttaagaggttctggagccattttcatttgaggaatagttgaagacattgagtgataatctaaaattggaagacttgatactagatgatattagttattttatacatttaaatagttgctttgtggcagagtgcagacttatattccattatgacatcttcaacactgggtgaaagttaaagggaggacaaatttggtgtaatatgttggaacaggtttcttctccccaaaatgtttatagtagaagataggaaatcatgtcagtgatattgtcagggaatccctgctttggttgagaatttatcagacagttgagaagagtctacagttctttgtttatgaatagttcctttaattctagtgtgatagataaagcattatattttctctgaaatcactttaaaatgtcagaggatgctacaattcacctgtatttagacctactaacctccttattttcagcgattattttttaccatgaaggcaggaatctgcttaatacattgtttatagaatgtaaacagaagctctttcagtttcttcataatctactccaaaaattttgcaaatatttcttattctcacaaagtcatcctttcatatattccttttatgtttcttttgatatttacatgaagtctcttctatcatgtgtgcttttgaagaacattttttatacttcataggtaggaatcagccattaaaaaacagcctctaagattatggattatatatggaatattgctttaaatttggataacaaatagtaagagttattcagagtttaaatattcaaactcatttagctcattaaaatgtggttttacatgcacagagaagagtcctagatgcttcattatatgaatttacttttgccttcccaatggatcattaactttactaaatcatttcttgcattaagtaacagacagatgtatgggcaatctaagagtaagaatctaaaattcaccctgcattagccaaattaacctatagcaggtatctgcggttggttatgaacactacaagctcatctaaaatgtttggaaattaagaatatatgaggacaggttacaggaactaggagaaatagaaagaattgttttccaaggtaagattggcaactgttctccagctttagcaatacctaaaaagaaaaaaaaatagattggtgtagaaactttagaattataatttcagtttgggcagggacacgagtgggggtatggttaccaacaggattatagcctacttcaagacctatgagattttatgtgaaataatattatagttgttctttaaatgtgttagttaactgtttataaggataatgtatggaatctaaacaaaggagtgggaataggccaggggaatcctcaaaattttctttaggtttatgacataatgcagaaataatgtctttaggatctgtgcatctgaattttaatctgatggaaacaatattataaagtgactaaataaatgaagctgggcctgaaattgtgttctaaatagaaatgttgtcaggtagattctccttccttgaaggttggtttgtatgttagaagtggtttcagatagttcagaagaacatatactcactggggtttttgcctgtcgtggatatatatagctacgactcctgagtgccacacaggagaaatgcaacttctgtattctgatgaaagggtctataacaagacagaaaacaaacctttggttgaaagatgagatattccatgtcttcagagactgcagctgggaccagaaatcttgtatttcactaactctgtttggccatttaatgcccaagtgtccactttgctgcctgagtttctagatttctgtcggacaagaacacccataggagacattaaggcaaagagcaagggaggcagtaatggcaaggtactgtgaaatgagcagaaaaaaatcctgcaccagaattagagtgagggctgaaaaaggcagaaggaaagcaatggttcctggggagtgcacagagaacacttcagcagctgctgctggtgctaaattgtcacttctgatctggtttgacagttacagtggctgaaatgtgttagagaaatccacgttactgggctaaatctagatcattagagagtagtattatacccacttgtttgttatcaatagggtttggtcacaaacaatgtgacttgtttttgtttttgttaacctgatgtagtataaatacattaagagtgtttgaatttgtagctgactctgagcttctgaacactcacacctttctactcatggtaggtccttttcgtgtaatatagaagctgtagtactgatttccctctgaatagggaagattactgttagagagtttttcaaagacccaacacaatgaagatagaatacggacatatttaaatattgggtttttgaatctgaaaataagagaaataaaggaaacttttgaacttcctttaaaaaattgacaaattttgactgtgagatacaattttagcttttttgactgtgagatacaattttagcttttttgactgtgagatacaattttagcttttttttttttaatgaattctcactctgttgcctaggctggagtgcaatggcgtgatcttggctcgctgcaacctctgcctcccgggttcaagcaattctctgcctcagcctcccacgtagctgggattacaggcaccccccaccacgtccaggtaatttttgtatttttagtagagatggggtttcaccatcttggccaggctggtcttgaactcctgaccttgtgatccacccacctgggcctcccaaagtgctgggattacaggcatgagccactgcacctagccaatgttagcatttttttggtagctatttgagctttccttagagtaagacatgtacagattaataaatcatggtttttgagttgccagaggtctgttgtctagtaaatggcatgggctataaacagacaactaaagaagtgaaaaagacgggagaagagggcaaaggatgaataaaggaagtgctgggttgaaagttagccaaacttgagttatagctgaaacctcgaaggtacaaatctgtgcccaatggcatgtacggaatatttacaagctctttttgtgcttctggaatgggagaggagtgatctgaattttagttttgctctaggcatgacatgtactgtgttgatacttctatctggatagctgagttggtataattgagttttaaatgaaaaggaattggttaaactaaaatattcgcaaatatcacctgattttagggaaatttcaagaaacaatgaacaagtcttcatactaataataaaatactgattttctctggataatttatggctaaagaacatggttttcattatggcatgattgaagtacactttcaattggaaatatgtgaagaaactaaaattttggccctctctgaactttttaacaactgagaatgttctcacctgggggcaatgatgaaaaacattagctaatactgtcccccactccttatctatagtgtcaagaacaaaaataccaccaaatatgtgatgtcatattttcggtgttactgagtattacttttttagcagaaaaaaatgtgaatttataaaatttatttattttctcaatagattagcaaaaagcttgagcaaatttggactaaattattttgcactagatttctggcctttaagaaaattagaatagttttcatttactaaaatgtccactacatggaaattcctgtttgaaatgatagcaataacagaaaaatgatcagttcattgcacagtatgtattaagtgagagcatttgaattgccaacttcctataatctctatagaaattttagtgcctgtaatcactaaaattgagtgtgggctcactagatatttatgttcctttccttgagcttattaccttcagtttttctttaaaaaaaaaaatcaaaagagcagttgaagaaaagtagaggagataagttccagttggctatgcagttttgaaacagatttgtctgaattttccattactatatttgtcaattgtgaatttattttagaataaaaccttgcctaaaaataaattgataacacataagctatatatttgagcaaataagttttgctacaattccccagttccttgcaagttaaccattacttttaatcttcggtgatgttttcattgatatcagacctacatcaataaatatatttatgctttgcttcccaaaccaaattttcctggataaatattaggacagaaaatgagcacaagatggctatgaaagaatgcaataaaataggcttccaaaaatcagtattttttcccaaactttgaaaagtaaaaaacgtaagaagaaaaagatttgtcttagaaatagaagagagtagaaagtgaaaatgaactttaaatttaagagaccggagggcccataaatactttaaaaattcatagacaaagaaaagattcatgcatgcgttatttaaggaaaaactctcagcaaaccttttatagccgtaaactttctcatacactttgtccagaatctaacttcagtataatcatgatgtcttagaaactttctaagcaatacttaattaagatacacttctaataggacaagttgcttttagcctctttgtaagaggttaaaatatctctaatgctctcatttgagatatttaccattggtctcctttgagatatttaccacaagccaattacacagacgattttagatctcatgagaacaaaataagagagaattctataaaatcagaaggctgttgactacaaaattagacaaacaagaatcaaactgtacattaaaggccacaagaaatgtataataaatccactgttatttatgaaggtgcacacaaaattaaaaaggctgattataaaattatgaagtcacacaatatataaaaggaataaatatttgttttttttagtgtaactgaaaagataccaatattattctgacttgtgacattacgctcattcagatcactaaactttacataccatttgtccttaataaaagtttgttgttgttatcaaatgcttttaaaagttgtaattaatgtcttaaaagtatgcaattaccagttgtgaaataggataaaacacaaagtcatgtaagacgtgttttctcaattgttatccaaggctgagaaccaccctatccaagctattctcttcattggttctgatttcagcttttctcctgaggtaaaatcatttctgtattttccattcatactagactctgcttcaaccaaattctcacaatgttgtcagacatcttgtgttcaataataaaatatccaaaggtctatgatccagactgatctcaatcttttgtaataaaaacaccagctgctcattactgagctggcgctataccaggtgcttacatgtattaatctcttatttaatcttccacattgctccatgagatggatgctgtgatcatctctattttgcagataaggtaatttaggctaaggggtatataaggtgtgtcatggttaccaatgatactcaggttgccagattttatggtcaatcctcagtcctcatattatttgaatactaggtactatttggcacagttaaacactacctactttttaaaatcctttcttagaattctgcaatattatgccttcctgatttctttatactgtagtggttgtatttttctctcatcttttttggtagctcttctctgatctcccttaactcttaatgttcaagtgcctttgagctcagtctttggtctcttttctatatatgtctacttttaaaattcctatccacacacacaaatttcttattttatgcatataaaatggctgtcagtagaattattcatgtatatggattcataaaggaaagcaaccagaaatggtgtcatatttttctgttaaaatctgcttaaatatgtgtaaatgtcattttttaaggagagttcagctcctgggagatgctagctgtatcactatgtctgttctgtagcagttacagttttcaactatacctctggaagagattgaaggtcagggaaagtgatcaggtaaggaaagagccttcctaccgacatgctattctgatgaatgtaggcttatcatgcttaggacttttctttcctgatccactgatgtgaagaaagttgagaatatcttgaactctctatgagacattacaactttagctgatgaactttggcatcagcaaaaactctttagtaacaattcaggatttagctgaaataagtttcaggaagtagaactaagaataggagtagaacttaggactattaatttgaataccatattgagtaggtgataatataagatccagagagaatatgaagtcttctcttcattaaggtagatagggatgtataacaggaaaagattaataaagggttaatgtgttcaggagcacagaataatgaacactttaataataagcaaagaaaaatttagaaaaaaaagaaagcagatcagtgttttcctagagagataagtaggcataacactgcctactcaatgacaaatgacaagaggaacattttcgggtgatgaaaaggttctaaaactggattatgataatggttgcacagatctataaatgtattaaaatcatagcgctgtacacttaaaatcatcaatcatacctgaatacagccattaaaatattctaattatagcatagataatcaattcaaacagaggcagggagaccagttaggaagctaaaacaataatataagagagaggatgcctgcctctgtgaatggaagacacatattcaagagaattttagcatatggtaggtgtaggatgtatggttgataaattgtagaaaataagaaaggtacaagataaggaaagtatccagatttctaacataagcatcagaatggatggtggtgaaattgattaaaacacattcagaaaattcattaaaataaaaaacacagaacataggtagaagaatagcacattat

SEQ ID NO: 836 - DNA, 1761 bp, Homo sapiens
caatggcattatcactggaagaattcgtccactcccttgacctcaggaccctacccagggttctagaaatccaggcaggcatctatcttgaagggctctatttatgaaatgtttggaaatgaatgctgtttttcaacaggagaagtgattaaaattactggtctcaaagttaagaagatcatagctgaaatttgtgagcagattgaaggttgtgagtctctacagccatttgaactgcctatgaattttccaggtctttttaagattgtggctgataaaactccataccttactatggaagaaatcacaaggaccattcatattggaccaagtagactagggcatccttgcttctatcatcagaaggatataaaactagagaacctcatcataaagcagggtgagcaaatcatgctcaactcagttgaagagattgatggagaaataatggtgagctgtgcagtagcaaggaatcatcaaactcactcatttaatttgcctttgtcacaagaaggagaattctacgagtgtgaagatgaacgtatttacactctaaaggagattgttgaatggaagattcctaagaacagaacaagaactgtaaaccttacagatttttcaaataagtgggactcaacgaatccatttcctaaagacttttatggtaccctgattctcaagcctgtttatgaaattcaaggtgtgatgaaatttcgaaaagatataatccgcatcctccccagtctagatgtcgaagtcaaagacatcactgattcttacgatgctaactggtttcttcagctgttatcaacagaagatctttttgaaatgactagtaaagagttccccatagtgactgaagtcatagaagcacctgaaggaaaccacctgccccaaagcattttacagcctgggaaaaccattgtgatccacaaaaagtaccaggcatcaagaatcttagcttcagaaattagaagcaattttcctaaaagacacttcttgatccccactagctataaaggcaagttcaagcggcgaccgagggagttcccaacggcctatgacctagagatcgctaagagtgaaaaggagcctcttcacgtggtggccaccaaagcgtttcattcccctcatgacaagctgtcatccgtatctgttggggaccagtttctggtgcatcagtcagagacgactgaagtcctctgtgagggaataaaaaaagtggtgaatgttctggcctgtgaaaaaatcctcaaaaagtcctatgaggctgcgctgctccctttgtacatggaaggaggttttgtagaggtgattcatgataagaaacagtacccgatttctgagctctgtaaacagttccgtttgcccttcaatgtgaaggtgtctgtcagggatctttccattgaagaggacgtgttggctgccacaccaggactgcagttggaggaggacattacagactcttacctactcataagtgactttgccaaccccacggagtgctgggaaattcctgtgggccgcttgaatatgactgttcagttagttagtaatttctctagggatgcagaaccatttctagtcaggactctggtagaagagatcactgaagagcaatattacatgatgcggagatatgaaagctcagcctcacatcccccacctcgccctccgaaacacccctcagtagaggaaacaaagttaaccctgctaaccttagcagaagaaaggacggtagacctgcccaagtctcccaag

SEQ ID NO: 837 - protein, 565 aa, Homo sapiens
KSRQASILKGSIYEMFGNECCFSTGEVIKITGLKVKKIIAEICEQIEGCESLQPFELPMNFPGLFKIVADKTPYLTMEEITRTIHIGPSRLGHPCFYHQKDIKLENLIIKQGEQIMLNSVEEIDGEIMVSCAVARNHQTHSFNLPLSQEGEFYECEDERIYTLKEIVEWKIPKNRTRTVNLTDFSNKWDSTNPFPKDFYGTLILKPVYEIQGVMKFRKDIIRILPSLDVEVKDITDSYDANWFLQLLSTEDLFEMTSKEFPIVTEVIEAPEGNHLPQSILQPGKTIVIHKKYQASRILASEIRSNFPKRHFLIPTSYKGKFKRRPREFPTAYDLEIAKSEKEPLHVVATKAFHSPHDKLSSVSVGDQFLVHQSETTEVLCEGIKKVVNVLACEKILKKSYEAALLPLYMEGGFVEVIHDKKQYPISELCKQFRLPFNVKVSVRDLSIEEDVLAATPGLQLEEDITDSYLLISDFANPTECWEIPVGRLNMTVQLVSNFSRDAEPFLVRTLVEEITEEQYYMMRRYESSASHPPPRPPKHPSVEETKLTLLTLAEERTVDLPKSPK

SEQ ID NO: 838 - DNA, 43572 bp, Mus musculus
ggccaattaggcagcagcctgtcccatcacactcactatcagggacaaggatgcaaactagtgctccgtcaggttctcttcactgtctacagtccagggtcttctgcccagggaatggtcccagtcacaattacatcagctctttccacatcagttaacataaacgagagtcatccacgggtatgcccaggggcccttctccaaggagatcctagatcctgccacactgacagttaatgctaaccattaggcttcaaaccctgaaaataccacagttactccataccatgtatacccctatactgtgtgtcccccatagcatttatcccccaattccatgtgtgatggtttgtatatgctcggccatggagtagcactattagaaggcgtggccctgttggagtaggtgtgaccttgttggagtaggtacatgagtgtcggctttaagaccctcattttagctgtctggaagccagtattgtgctagcagccttcaggtgaagatgtagaactctcagctcctcctgaatcatgcctgcctatatgctgccatgttctcacctcgatgataatggactgaacctctgaacctgtaagccagccccaattaaatgttgtccttataagagttgccttggtctggggaggggatagggggtttttgaaggggaaaccaggaaaggggatagcatttgaaatgtaaataaagaaaatatctaataaaaagaaaaaagaaaagaaaaaaaaagagttgccttagtcataatgtctgttcacagcagtaaaaccctaaaagaccatgtatcccctcataccatgtatcccccacatactgtatccctccatactatgtatctatccatccataccatatatcccccataccatgtatcccccacatactatgtatcccctataccatgtatcccccatactatgtaaccccataccatgtataccatgtatcccccacactatgtattctccataccatttataccatgtatcccccatacaatgtatcccccataccatgggcatatactgccacacagatacagacacatgcgcataatttaaaacaataaaaattggatgatagggtgagattgcacagtggttaagagcgccgactactcttccaaaggtcctgagttcaaatcccagcaaccacatggtggctcacaaccacctgtaatgaaatctgatgctcccttctggagtgtctgaagacagctacagtgtacttacatataataaataaataaatattttttaaaaaaatttaaaaaattggatgataaaaaaattagatgataaagatgcgtatctctaccctcgcccacccctgaagttgtgcttccgcaatagaattggctaagagctcagtgattgagagcactgactgctgtttagaggaccaggactccatttccagtgttgagaggggaaaaaaagtcatgtttcagaagtcacctacatgaggaaattataatcttaaaccataggggaaattgcttttattattgttgtttattttatgcatgtgggtgttttgcctgtatgtctgtgcatcgtgtgtgtgcacagtgcccacagaagtcagaggagtgtgtgggatgtcctgaaaccttagttacagatagttgtgagctacctgtggatcttgggtatcaaaccctggaacttcagaagagcaggcatttgctcttaactgctgagccatccctccagcaggaaaaaaaatgttttaaatgatagaaatagaagcagtttatttagggtgtatttagcagcattccttggctggaagtttgctagtgtactggaaaagacagatattcaagagccaacgatagggacttttgtttgtctgtttgttgtgttatttcctggagataaacacaggctccaggaggctaggcctgtggtgggccacatccctgaccctcacaggtaagcacagatgaccactgggtgatttgtccccattgtgggtagggactcctcagagcaatgcattataggcaggaaaaacaaagcagggtgtggatcccccggccatcaccattggttgtggctatagcaacggaagacagaaaaaaggggatcacactgtcctccaccccgatgcagaattctgtgttgtggttggacaagctccagctcattcaggagttatgaacaagcatggccactggtttagagacgctaaggagaatagactcaaactcaaaactcatctgcacacattcaccatccatctatctatctatctatctatctatctatctatctatctatctatctatctatctatctatctatcttattcacatagccctggtctctaactccctatgttagaggctggcattcaatacctgaatcctgtatctctctgatactgggatttcaggactgctttccgccagctttcctggatatatcccattttttgtttttgtttttgtctttttttgggacaaagtctcatattgcccagactggtttcagtctcttgttgctccttgcttccactgatgctgggattacaagagggaagacatgcccatttttaaactaaattattattttacctatttgtgtgtgccacaatgtgtatatggaaacctggggacaacttgaaggagtcagtagacccttctgccatactggtcccagggttgaaacaaggtcattggtcttggtggcaaatacctttactcactttgctgtcttgcccaagcctttacacacccattttcaggaaatatatttctccggtagaaaagtattttgaagatggctgctgctatagatccatccacagagtcaacatggcagctttcacatcataacagtaaagatgtcatagctggtggcatatgtgattaaaatgaaaggaaaagactgtcttacaaaatatgaaactctctctggctggagagatggctcagtggctaagagcactgactgctcttccagaggtcctgagtttaattcccctgcaatcacatggtggctcacaaccatctgtaatgggatccaatgccctcttctggggttcatgaagacagctacagtgtacttacatataataaataaataaaacttcaggctggagtgagctgggctagagcgagaagaaaaagtgtctgaagacagctacagtgtacttacatacaataaataaataaatctttaaaaaaacccaaaatatgaaactcttaaatattcctcaacagttgatagtgtgtgagagagagaaagagagagagagcgagagcacatgtcaaagtgtttgtgtggaggtcatattgaaaggcagttctatcttcccatgtaggttgccaggctcctgtagcaaatgcctttacctgctgatgcgtctcattgggccgtgttttgttttataggagtctgggtcttgaatagcctctgatagcctgcagcttttttttctgtaggccagcagagcacagtgcataaaacctgcggtggtggtgcagggcagaaattgtctcccagttccaggccatcctgggctacatggagcctttctcaaacaaacacaacaaatgagcaaacaaagagtatgaaagttttatcttttcattttctcgcataacagagagattgacaggcaggagagtaggcaaacaaggaacctcaataactcactcagaagctcggagctggggttagctcagtggcagagtgtttgcttagtgtgcacggacgccctgcactgggtccctcacactgaaagaaaataataatcaccaactccaattgtctgtacttataaatcctaccagtgtgtgttgttccaagtcatatataaatataatctgtactctcaaaggagttggtgttggggatatttcaggttctgaatcaatagaaaaacactaagaatacaaggaaaatactaaaagaaaaaagtgttgtttttttccaacatcaatcccacctggacattcaatgctgtagaccttacatttctgcagaccagaggcccagggttcaggttcaggtttatttgatgggtacctgaaagactgagctccggatgtctgtcaggcacctttccctgtcaatctgctctttcttgctttgggttttgttttgctttgtttctccagtgctgaggacagaactcagggtttggggtactgggcaagcactccacaactaagtcacatcttgagccctttccatttaattaattaattaatttacagtaaataatttttttattaaatttattccctttacaacccaatatcagctctcgctctcctcccaatacccccttatgcaggtccttcccccatcccccttctcaaagagaaggggaagcccccatctcaaatgtcactcccccacccccgccccctgcacatcaagtccctgcaggaggagtaggcacatcttctcccacccaggccagacaagactgtccatttaggggcgcagcatccacaagcaggcaacagactcagggacagccccagctccagttgtttgggagacctgcatgaagatcaagtggctcatctgctatatatatgcagggggcctaggtccagcccgtgcttgctctttggtgattcagtctctgaaatcacaaagggtccaggttagttgattctgttggtcttcctgtggagtccctgtcttctttgggccccttaatctttctctcaactcttggattccccgagccctcaacacccagagctccatctaatgtttgggtgtgagtctctgcatgtctttccattgccttctgggtggagcctctcagaggacagttatgctaggttcctgtctgcaggcatagcagagtatcattaatagtgtcagggattggttcttgctcacaggatgagtctcaatttgcatcagtcattggtgggccattccctcagtctctgctctttgtccctgcccatcttgtaggcacattttgggtcaaagatttgtggctgggttgctgtccttatccttccactggaagttctgcctggctacaggaagtgaccacttcaggactcatatcccccctgctaggaatctcagctagagttgcccccttacaccttctgggacctctccccctcccaggtctctggcatgtcctggttcagggtatgacttagcccaaaatggcttccaatttaccgtgtagccaaggatgagcttgaatttctaatcttcctgccttcgcctccagaattctgggagacagacatttgccatagtttgtctgtttagattactttaagacagcatcttcttagctagccagactggcctcaaatgctgaccttcctgcgtggcctacaaagtgtggagattacaggaatgtaccatgatccccaactacattcaccttatatatgctgtgcccttgggcctcagaagcattctcaaagtgggaaaagtaattacattcctgtgcttcaaagacctctatagtctctgaatcatgtaagaaataacaggagtctttctatcaagtgctataaacgttgtgtttaggacaaggaattaaaatctttttacttcccttgccttgtaagacttttatacaaatgttttaatattcctcacctagtacatctttgtttccataaaggtccactgcctattctaggaatgtgatggcccagaacagtaacccctccctcttcttccttcacttcctgtctgtcaatctttttcttattagctaatggagtaagattacaaaatctgaccgaagcaagtggggaaagacccagctactgtctgagttagagtagaaaccaaatgcactttctaaaccaaaaaacacctagagtgtgcggggattaaaggctgtgccaccatgcctagctcacagggatagacctcctttgatggtgttgcttatacgttctcatttccatgaaattttctgagacagaccatagatagacaccttagggatcaggttttccttttcctctttttggagaaaaggaactggatgatggtattcatttatttatttcattttgtcaacagaactctctgcagtaaactaatgacttaaactttgtacactgaagatagactgtgatattccaggtgtcttggtgtacatggacatgtatctcggactcctaacctgggacttgggacctctgttgagactatggggtcaaagaacatttcattgtttgtttcatttgctcggcttccttccttcctgttcatgggacacgtcaccattttatttatccttaatcttatacgtgtgggtgtttcaactgcatggtgttgttgtgcatgtgtgcagtaccggagaactgagtgtcaggtatgcgggaactggagtcacagacagctgtcagctgccatgtgggtgctgaattgagagggcatcagatcccattctagatggttgtgagccaccatgtggttgctgggaattaaactcaggatctctggagagcagtcagtattcttaaccactgatccatctctccagcccccaagcaacttattttaaaaaagcatttaattggaggcttgcttacagtttcaaaaggtaagttgatgaccatcatggcaggaaacaaggcagcaagcaagtatggcactgagctgtagctgtgagggacactgggcctggcttgggcttttgtaacctcaaagctcaccgccatgacacaccttcccccaacaaagccacatctcctaatccttcctagttctacacactagggaccaagcattcaaagtctatgggggtcattttaattcaaaccactacaatgtacatgcataccgccatgtgtgtctacacacacacacacacaaaatatgtaatatatacatgcttatatacatatatcttgcaggagccagactttgtggtacatatttgaaatcatagttacttgggatgcttagataaaaggatgggaagtttaaagctagcttgggaactaaaaacagtacttcttaaggaagaaaagccaagcttggtggttcatgtccgtaatcctagctcacaggaaaatgaagccagagcagtatcagaagtccaaggccaacctgtcccacagtccaagcctgtctaacaagacaaaacaaacatagaaaagtttagctcagtcggaggagagcttgcctcgcacacacagcagcaacagagtcacaaataaaagaggatcaacagtttgagatcatcattggctcatctgagcgagagagctggggttgggggagaaaaaaaagaaaggagaaaagacgagaagaagagtgggaagaaaaacaaaaggttaaaaaaaaaagagaggaggggctggagagatggctcagtggttaagagcactgactgctcttccagaggttctgagttcaattcccagcaactcagttcaattctgcacaaccatctgtaatgggatctggtgccctctcctagtgtgtttgaagagagcaacagtatactcatacataaaataaatctttaaaaaaaaaaagagtcggggctatatatagctcagtgctagcattttccatgcaagaaaacttaggtttgatcagtaacacttaaaattattgtatggctgaaggcatagcagagtggtaaagaacttgcttagcaaaagaaaggccttgaagcagggcagtggtggtgcacgcctttaatcccagcacttgggaggcagaggcaggcagatttctgagttcaaggccagccagggcttcacagagaaaccctgtctcaaaaaaaaaaaaaaaaaaaaaaaagaaaagaaaagaaaagaaaaggccttgagtctgagcccccagcacacacacatatacacacacacaaagctggaaggtgaactttcagtcctccaagtggacctttactccatttccacagagatgatctggcgtgtggatctgaggataatcctgggatgtcagtgtgcaggacaacttacagaatgaagctgcaccagtgtcctgtgtgtcctgacatggactgaggatgccaggagtccagccccactcagcctgagcctggagatcctcaaagggttccaaactcttgtccagtgaacgactgggtcatctagagcattgtgaggcaagacagaaccagaacagactcagaaagggagggctgccacagtcctgcccgctcacaatgtgttaatctccgaagacacaagcctaatcaggaaagatggggctgcctctcccaaggtagtattaggggttagttgcagtgctgatctggggtggtggcacatcatttcaacctggaaaacaaatcaaatcttcttgtaggcagaacggcagatgggccaacacagttccctggaggtatgaggcctgaagctgaagggaccagcaggtaactgggcaccacagcctgaggccagtcagtctcaagcaagaacatcctgcttcctccaagggtttctttgcctgaggaaagtggaagctggcactcacattccttcaggatcttcggaaaatggaggcaagggtgatcccgctttgtttggtgactggtgccagtccaaaccggacatgccaaaaatgaccactctcttttctgtggttcaagatttcactccttaatggagatcaaggctgggctccgagagaaaggcaggcaatggcatgaattacagcgatgggtctatttgctgaagcacaaggacagtgtgactttgaccttgcagacctaaaaagggtggcattttatgaaagaaagtgacttattagatgtggttgcacacacctttaactcagctctggggaggcagaggcatgtggagctctataacttttgaggccagattgatttatataacatgctgcgttccagaccagccaagactatacactgaaaccctgtctcaaaaaaaaaaggaaagaaagaaaaggaataaataaaagaaggggaaaagtgacttgaggtttagacaggagtcaaaatagacagggagctggagagtaaagaagtggagaatggaatctggggactccgtatgtgtggggagacctgtgccaacaggcatgtgaggcagcctgcgttagctctggtactttgatgtggcaaaaatctgaccatactgctgccttcctaccctgaatccatcttgaaggagtgtgatgtggggttctctgccttccttaaagtgtctaatcttttgtgcccattgacagtttgtgagaatgttgggggaaagtgctaaatgtgaggctactagttacaggattaagaaacgtcttctgaggtataaggaagggtcagaacctgggccctagcagccttaactcattctcaacaggccaactaaaagacaaagtgtaaggggaaacttgaagaaaggtgttaactcggtctcattggaaagaacaacgacgggacattctcttatcctagtccatcttaggggctgacgtgtggtttgtttaggcttaaaggcaacagctatgcttaagtaagcagtcgtcggcaaggtgtggtcgcatccatcatctgttcgcccagtttctctgggaaggtagtctgacaagttttcccaactgtgatctatctttcctggagtcaagttcctctattggctggcatctgtgcccttgtcctttccttctcccaggaaaactgcaatttcttagagtccagtgttttaatagtctgattgcaatctggcaatcagggtgtctagaatatctttaatcctaccatgatggttacaggttcaagattggtcccgcagccaggcagctcatgcttacttccgcatgccagaggatgagctggctgaggtcggaaatgtcccgacagaaggctggattcctttggccacagcttaaccgccattggcaagaggcaagcggaagttctccgaggacatcaattctccttgctgcgcttaagtcccgccctgctggtctgggcggtgtctccgtggcgacgtgctgctatgtgcggctgcgcaggagtgacggggcgcgggcgagtgggaggggggtgttttggttctcgccgctcgccgtcctttccagacacggcggtaggaaagctgcttgttcctgcttttccttccccttcccttccccttcccctttcccaacccggattttcccttcttccatttacgcgcctcattttgatcgactgctgcccgggatccgagccattttccgggccgggcgctcgaaagcgcgcggccccagggcccggttcatgacccgtcgccctgccgccccttgccttctccgcctcatgtggctgcggggccacggcggcgctgcccactatggcccggaaagcagttagcaggaagcggaaagcgtctgcctcgccaggagccgggagcgacgctcagggcccgcaggtgagggctcacaggtctgggtcatcacctagcaggggcttagggcgttccagctgggttcaggaacctggggccagggcgggacgagaaccggagccgggactgtagagcagtgaccggtccttctgcagtgtactggcgagcaggcgggccggaagggtgaggagccaaaagaaaactacaaaatgacgccttccgctggaagtcagcagctagggatagagagcttcaggacctcctcgttcctggagggaggagaaaatgaagacaaggggaatcggaagtaagaccgaccttccgaagttactgggaaggagattgaagtggaccttccagtggcactaggaataagggccgatggtctcttatcaaggaaaccatctcctaaactgggtgcaggcccctttggctctttagacatctagaagaaacaccaggtgtcatctctatattgccccctttggagaggaaggcctcttggacttgggattccgacgcaggttaccccgttggtatttgatttttcgaattctaaaactgcccgcagcgcaagtcgcgcggagtcagatgagcggccattgactgtacatccctggaagatccgagaccccagtctggctctttgagctatactctttatgctctacggggtgcacaggcggagagggagaagggggctgggtagaagtgcagcccaggtgggttctgtaatatggacttcatttcgtaactatcaaggacacctgggtatatgttatttctgagccctccactttcctcaaaggtttagttaacttttttttgccctgtttatccattttctaagtagtcttcattatgagagccttatttcagtgctagccgagttaaactgtactttctggattacaaatcttctgttaaatgtttgattgtgtaaatcccgaaggacgaattcgtgttggttcttttataaaacggtcagacttcttgtctgaaggaaaagtggccaaacccctgatttctgatgttggctttcacagtttggctgggatcattcgctgcacaaaaggaaaagactccccccagtgaagagatccctagtgtactacctgaagaaccgcgaagtcaggctccagaatgagaccagctactctcgcctgttacatggttatgcagcacaacagcttcccagtctcctcaaggagagagaatttcacctcgggacccttaataaagtgtttgcttctcagtggttgaatcataggcaagtggtgtgtggcacgaaatgcaacacagtaagtatcaggagtgctctttgtcttccttttgttgctgctgcggtttggtttggttgagaccagggtttttctgtgaagacctggctgtcctggaactcactccatagaccaggctggcctcgaactatctatctgcctgtctctgcctcccagagctcagcggtgtgggctgtgcttcctttttcttaggtctgagatgtgggacttggtttactctagcacctttcactgttcgtctttccccgtttgtttgcctttttttttttttttttttttttgtaagcagagttggagtttattaagagatttttaattagaagtgttaggacaaagaagtgctcaaggaatgagtaaactgtagtgtgggtctgggctcttgagggaaacgtgctcccatcagcttccctctctccctcctccttcattggtgaccttgtcctctttttctgcttcttttctcacttctgagtctcccgaccccttcaaatgaacatgtgttttaggtcccctgactctgtatgctgctgcttctagtgttttagataagaggcctcaaagagaaattgatgtcagagcatcatttagggtacacggtagtgaccgtttcattgctgtgtatcagcctttgacatagttagaagtattaagcaccaagctgaaggtagaaatgagacaaatactttttcatatattagaatccaaatgtagcattttggaatctggggcaatagaattgttacagttccaagtcaggcagggctttatagttgagactttgtctcagaacaaacaaaactcaaagatatgattagtttctgggacaaatgtgtgtgtgtgtgtgcctagtggcatatgggcatttgcaaagaagagaggaaaattatggacatgagagtaagggagcagttttaaagagagtaagggttataagtaattggagtagaaatcttatcaggaaactatgtaaccagtatggttacaagctagaagagtcaaaagagtgggtgtggtgcttgctttagcattgtatacatacttaaattgggacgctacagagaagattagcagggctcctgcacaaggacgcttacaagtctgtgcagtggtttatctttttaagaaagtggatatgattggaatggaagtgtgcagatggcaagacatctcagaagtcgtagatgctaggagatgtaggactggagttggggaaatagttctgtctagccctccctctgtttttaactcacctagtgtggatagacaggtaatgttagaatggcgagtaaactgaccctggaccaaaacgtatctggggttatttaaaagaaaggttactctacatcaagaactatgggcctgtgagattgttcagtggaaagatgctcgctgcccaagcctgatccccagaacccacaaaaaggtggaagggacttcataaagttgctttctctgacctccacatgccacactctctgaaacgtacaccacacttacaacacatcacaatagtagtcatcgtcgtaggaataataatagtataaattttaaaaagaaaaagaaccttgggtgctcagtgggcaaaacttgccaagcctgccaacctgactttgacactcaaaacccatgggatgggaggagaacaaactccctcaagctacacgtgcttggcgtggcctgtgtgcccactaccacatacaaataaaagtgtttaaaaaaaaaaaaaaaaggactaaaactgccagagaccataagtactggtagtgtttttataaaggtcataggcaaaattctaatcagttttgaggaaggaagtaatactacggtggctggggccaaattttcacttctgttaaatattgtcttacacataacacttgcaaaactaggtgctacgagcaaacctgcacaaaacttcctttttctgatttcagtcttgccctgtggtttaggaaactgtcattgttgatgcttggagtagaaaaagtgtcgcctgtttcttttaatagtctgttgacagtattttgaagatgagtgtattgctaatcactgaatttactcttaaaaatttctttagcttggcactggagagatggctcaacagtaaagagcattcactgcttttagggaggacctgggtttgattcccagccctacatggtggctcacaagcatctgtattccagtcccaggggatgtgacgctgtcttttggcctcttagggaaccaggcacatgtgtgctgcatagacagacatgcagacaaaacaccatacacagaacaaacataatacgttttgtaaacatttactcttgatgtctacttctgtcttcctaagttaaaaatctatgttaattagtttttagatttcacatgtgttagtgggtgctgcatttgccacagagagcatgtggaggtcagggcaggagttggttcctccttccaccacgggggctcttgggatggaactcatgtcctcagccttagtgagaagctaagtgcctcctcacttcatcgtccctttctctctttgccctggctgtcctgtaactccctgtatagaccaagctggccttgaatttacaagagatctgcctgcttctacctccccaaccctgggattaaagttgtgtttaaatgctcctgtcccctaattaattaaaacttgatacctatttctgtcttctctgtctttatgatgaatacttggaaatagtggaggttatcttttgttttgaggcagagccttacatagttcatgttggctttactatatacccaagcaacctcaaaaaccttgctcctctacccccatttcataattgctgggattatagacaggtactaccacacttgactgttttttttttttttcatttttatgtgtatgggtattttgtgtatatggatgtgcaccacatgtacagagtgcctgagaaggtcagaagtgtgtattggatcttctagaactgtacttacaggcagttgttagacatcatttgggttttgggaatcaaacgtaggtcccctggaagagcagccagtgctccagccccagctgttttgttttggggtttttttgtttgtttgtttgtttgttttgtttgttttttgttttgttttgttttgagacagggtttctctgtatagccctggctgtcctggaactcactttgtagaccaggctggcctcgaactcagaaatccacctgcctctgccttccaagtgctgggatcaaaggtatgtgccaccatgcccggctcagccccagctgttttattcttctttgtttttaattatctcatacattccatccagacctcagtttcccctcccttcactcctcctagcctccaccccccctccacctcccctctctcccaaatcactgctcctccatttcccttgagaaagagcaggcctcccagggatatcacctgaacaaggctggacgaggcaaccccatagcaggaaaggggtcccaagaacaggcaagagagtcagagacacatctcacataaccaagctggattttgttttttgtttttttaaagatttatttatttattatatgtaagtacactgtagctgtcttcagacacaccagaagagggagtcagatctcattacggatggttgtgagccaccatgtgggttgctgggatttgaactcaggacctttggaagagcagtcgggtgctcttaccagctgagccatctcaccagcccggattttgttatttttgtttgtttgtttttattgagacaggatctctcagtatagtactcaactgtcctggaactcactttgtagaccaggctggcctcaaactcagaaatctgcctgcctctgccctcccaaatgctgggattaaaggcgtgcgccaccatggcccagcactgtttgttgttgttgttgttgttttggttggttttattttgttttgttttattttgtttttatagtattgttttctctttgctcagcttttagaaccaaatctgggaaccaagaacagtgtacccttggcttttttgacatttggcaaatacttcttatttttaccatctgtctttggttctgttgatgggttgcaatctgatctcatgtagccaaagactgccttgaactcctaagcctgttgcctctccaccttccaactgccgttggttgtttctgtaaaatagtaatagcattatctggtatgccagttctctggaaactagcagggtgagactgtagcactcgaggctgaggcaggtgggtctcctggttcattgtctggtgtgctggttgaaggttggaaactagctaggaggctgaggcaggtggatctgcctcgagttcaaggccagccatggctatatactgaggccatatctctggtaggtaggtaggtaggtaggtaggtaggtaggtagataagcaggtaggtagatagataagcaagtaagctgtgtgagagattgacattccagtacaacaagcttcaggtatctagagagttggaataggttagactgtgaaaattgatcatctaagattactttataggggaatggagagatatgggaaccataaggttagagtactgctctacggagaagaaaatgcaggaggaatactgtgagagataatgggataaatctaaatgacagaaggagaggatgaagagaaagatgtgagacagctcaggtaggacctgaggtaatgatgtgcttttatcaattggctgatacttaggagaaggtaaaatcttcagtatgggggttactaatttacaagagtattgaaattgctgtgggttttgttttggtttggtttggtttttggtttttttgagacagggtttctctgtatagccctggctgtcctggaactcactttgtagaccagactggcttcgaacttagagatctgcctgcctctgcctcccgagtgctggcattaaaggtatgtgccacccactgcctgtgaaattgctgtgttacttgaaagaaaagacactttggcttctgtcacataacccttcctttaaaatttcagacttttattttgttttgagtgttttctgggcaggacatgggtcagttcctagttttccggtgatttttttcaaaggtgagtactattgagccacaatggctaagggcctctaatcttaaaggggagctatatgcataaccttgggggttcacctgtatttaccaggcgggaactactacagagcaaacgaggagaccagaagaaaccaagaaagtacaaaaaacagtgaagaaaaggggagggagggaggggtcggcgccttaaagagaaatgcctgatattagatatttctaattaaatcctagaggagttttgtttactcagaagggtttgttgttgggcttcttgtttgcttagggtagtctgtgattgcctcaaactcctggtggtagagttgccccttggttctagctcttgaatactggaattatgggcatgaaccccccccaccccctcgtgtgaaactagctactgttttgagatggggtttcccagtatagcccttgctgccctggaacttactgtgtagctgagggtgacctctaaccctctcctgcctctgcttcctgtgcaagaaaccacacctggcaacgatatttaaattagggaaggattcatttctcagcatgatgccctctagcaagaagctcccagggagcatgtagtagagaaattgagataaaaatcattcgctctagctaatgaatgggggggtcgctcctcggaggatccggcttttgggaaggatttgtgttaggtgtttggggagaagtcttaaacaataagctctgctctctgaaggagtctagaaggacagtaaagctgtgagtagcaatggtgaggcagcctctccactcagcaggttagtctgctgtggctttgacaggagtcatgtttgacctccatttagagatgttctgtaaaattaatgtttttatcagagcaccaaagcccagccaaagcaccaggttaactctggtgttcgggctgctttttcttcacccctcacatccttcaccctgtgcctggatgtgctgctgcgttcactgatggacgtcatagtaattatgaagtagacaaactaattactgcaattggttgtcagataggagggagacctttggggcagcctaattttggaagtagaatggttaagcattagtgctgagaaagcagctgtaaagttaatggtttctgagatgatctgttcagattaccgaaatcatcattatttactgcagtttttctctttgggatattaataaaatctttattgttcaggactgtgccacactgtaggagatgtcaggcctgacctctgctgaggggagcagacatgtcactttacctctcagcatctccagtcaccatagtgaactcataggtgcacttccatgcacttgtacttgcacttgagaacatgtgcatagttgaaatgtgtgagccctttatttcaggagtagtttatttgaggtttgggctgctagatatgtgttgactctgttggtcctcatggccttctatcctggctggatctttgataggcattacagtcagtaccaggattactgttgggtgccaccatgccagctgggcgttgttctgttaaaataccagcacctgggagaagttgggggtgggggatgggtatagctcagtgtccaagaacatacttatcatgtgtgacaccaataccaagatgaaaagccagacagtagtagcacactcgcacactcaggaggcatggaaaggtggatctctgagtttgaggccaggctggtctacagagtgagtttcagatcagccaaggctacacaaagaaaccctgttgaaaagaaaagaaaagaggaaagaaaaattttcctgtgactttagagaagttaaagtttgccctggaaacatccaggactatcctgaagtgtacacacagggctatattttcctcttctaaaagagaagagaaactggcctagaatttgggccctgactgccttgattgtcagaattctttatattaaaccatagttgtcagactttttcactgaagcagccctagactgacagtcctgggccagtatgaagatttcctgaagttctgagataatattaccgtgagccaggcagtggtttagcatgcacgcctttaatcccagcactcaggaggccaaggcaggatggctgctgtgagaatgagattgtggtggactgcatgatgaggctagcttagtccaggctggaggggaactgttctcaacttaaaaatatatactagatatgctgtttataaatacatatcctataaatgattatttgagctgggtagtggtggcacacgtactctggaggcagaggtacacagatctctgtgactttgaggccagcctgttctatagagcaagtgccaggacagccaggactacactgtgaaaccctgtcttaaaaacaaaattaccattgtattgttacaaaaatatcttgtttctgagaaacagataagtatttgaagctcagggttcaattctcacacactgaaatactctgttggggtgtgaaagtcttctctcatctactgattaaatggctgctaccagaagatgaggctctggtttcttgtagaaatcaaagcaccaaatatatacatatgccaccatgcccaacttttgatcattcatgtgtattaaaattatggacacagcataaatattgaagaataaggaatgtattcattaaatgctagtgagcgtaaacagtaaagtactttgtggccatgagaaactgaagaaagctgaaaggcagagtggcgtgcatctgtatctctagcacttgggaggtaggatcaggagttcaaggtcatctgctgtgaggctgaagctacatgagaccctgtatcaacaaagaacccgaaagtaagtagggaagaccagcactgggagggaagaagcgggcagatctctgagttcaggccaatctaatctatatactgaattctagtacagtcagtcagggctacatagtgagactgtctttaagacaaaatcaaaaactagcctgggacaaagtaaggttaaggccaggcccagagagtgtaactgagtatgccccgccctcccaaatgtatagaaataccaggagaccctggttcagaactgaacatacacaaagtatggtgcccctgtgtgatggttcagcaggggagggcactgggtatcacgtttgatggagtgtaatcactggcactcactggtagaaggggaaagctaactccttcaggttgccatctgtcctccataggtatatcacactacgtaactgcgtgcttgtacgcataaacacacccacaaataagtatgcaatgtatgaccagaaggcattatctatgttaggttaattgaggtggaaaggcctaccctaattgtgagctaggatacaggacagaataaaaagaagctagcattcatctctgcttcctgaccgtggctgcctcaagctcttgctgccatcctcttccttcttgatgagacagagtctgggaacactgagccaaccctctaagctgctgctgagggccagtttcttagagcaggaggaagacagatggcaaacacagcctgttttccttcctggcccactgtggaactgtggtttcctttttcgtctttgctctcccctttacttcctattgttttggtttgacttttgtttggttttttttttgtatagccttagttctgcaactcactctgtagaaccaggctgacttttaactcagatctgcatgcctttgccttccaagtgctaggactaaaagcttggactactaccacccacctttttaatgtcagtatcaagatctcgatcaacatgtgtgggtgtggagatcagagggaaacacccgagggaattgattctctcttccaccatgtggttatcgggggggggggggggggggatctcggcagtaggtggtttacccactgagccaccctgctggcccagaggtgtttatcttcttgtctggaaaaccagcttaaatttgctctcctttctgtggtagatttcattttagaaagagtattgcgtttttagtaactgtaaggttctctttcctgaaagcctttgtcctgggtgtgcatttatacgtcatcacaccctcacctgcatccattgcttataatcttacattttccccagcagcagcctctgcatgttcccccctgtcctggaagggatcccagtaggttagtgtggagtggccccatgctgagtgtatggctgggatctgcatcagagccacgcccttgtcagtgtgaaaagcaactctgtgccaggttacccgcatccccaagcctactgtgacgaggcagtatgttctgtcccacatgaggcactcggtcactcgacaagtacggaagtgaagatgtggatagatatgattttgattgcctaagcactctacatttcaaatcacttaagttttttaaataccctgcaaaactaatcgataaagtaactgtacactactattttaaggtttcttttacttaatcatgtgtataggtataagtgtgtgtatgttaatgaagatgcctatgtaggccagggaagtagatcccctctagagctgtagtttcagatacttttgagccaccttccataggtgcttagactcaaggtcttacagtacatgttcctaaccattgggctctctctaggtgtatgccattacattttgtgccaaacctttgtagtaccgataaatatgaagaggccatcgaggcagctgagtgggcaaaggcatttgcctcttgagtttgaagacatctggaacccacagtggaaggaagggactgaccccatgttaagcctggccaaaatttagtacaagtctacagcacctggtatccccaggtggtctcccatccaagtactaaccaggcctgaccctgcttagttgatgagatcaggtgagatttggcgcattgagggtggttgagattcctgctgggtttggtagcacatggtttacataatgaattccaggccagtcagggctacagtgagaccctgtctccaaagtaaataaatgctatgcatggtggtatatgtatgtacttgcgaggcagaggaaagtggatctctgtcagtaggaagccaactattctacatagttcctggcttgctaaggctgcacggtgagaccctgtttcaagaaagaaaacaatgaaaattcccagggtctgctatatgataggctctaatcgaactctccacggatgacttaacagtgttgactgaattaaatcgacactattgttttatgtgccccttctctcttgcagctctttgtcgtggatgtccagacaggccagatcaccaagattcccattctgaaagaccgggaacctggaggtgtgactcagcagggctgtggtatccatgcaattgaactgaatccttctagaacactcctagccactggaggagacaaccctaacagtcttgccatctaccgcctgcctaccttagatcctgtgtgtgtgggtgatgtaagtgtttcattggctgtagttagtttcaggtttctcctgatacggggatgaggggtggaagagagcagagtgggtggacattggggtcccataggtaagaaccagcacatatgtttgaagaagggacaaaatgacagatccctgtggccaatagtgggctgtttttcaatttagagggtccacatttctctcagaaaataaacttaccgatccatccatagtcaggtattgttttggctccagaagtatagcatgaatgaaattaataaagcccttgcctgcagtatagtgttgagtggtctctgtgacatgccagggtgacatgccacagaggaggggtacccgcaggctaaggggatggactcttaagcagcaggggagcactgtttcagagagcaaagaaagctcagtgagaagacatgtgaccagggccccttaaaggaactgtgagcgccagccatgggagtgttctaggcaggagacggggctccagggtagaaagctggaagccctgctctctggacattttgtttttgttgttggtttggggttttttgtttgtttatttttgagttttggttttttgagacagggtatgtagctctggctatcctggagctccctgtgtagatcaggttagcctcaaactcactgagctcctgcctcctctgtgctgggattaactgtgtgcccctctgggcattcttcctgtctgcacaactgccaggcgtattgtacctctgattgtccccagatgttatgaggtctgacctcacaagatcatcagaggcccacgttgttctttgcctgctgttgctttacattcatctgtgtgtgcagatgcacgcgtggaggccggagcacactgagaaagtcagtcctctccttctgtcttgtgcggtttggggatcaaactctggccatgagaggtggcatctgtcagtcccctttacttgctgagctatcttgctggctctgtttgttcagcaccagggtctccatatgtggctcatgctgtcccagaacttgcatcctcggcctcagcttcctgaattacaggatatgcaaccatgcccttccatacttaggatttttaagatgcattttcagtcagaccagcacgcttttcagaagacttcaccatggcccttgtttgactaacctctgttgttgtttgtgttttctcctctctgtacatgtcacttacccctctaaggatggacacaaggattggatcttttctattgcgtggatcaacgatactatggcagtgtctggtaaagttgcccttatttagggagatttggtgtagcaaagacaagtattacaaatgatcctgtggtagaaagtaaccatgaaagctcctgggccaaggtgcccagtcttgttacttgaatttactcattagctaggtggtccgaggttgaaatagggcatgcatacgctgacggtgtgcccttaccattcagtttcatttcccagactcccctacctcgtgcacctcatgctcctcaccactactgattttggggggcggaacagggtatcactttgtaaccaaagctggactagaactcatatgtggtctatactggtcttgaacttgtagcagtccctctgcctaagctgtttttgttgtttgtttggtttttttttttgagacagggtttctcagttttttggccctggctgtcctggaatggactctgtataccaggcaggcctggaactcatagatccacctgcctgtgcctcctgagtgctgggattaaagggctgcccagctctgcctaagaattttaagtgttgatactcttaagtgtacctactacacccagcttaggagattttgtgtgttattccaccttatatttttaattgattgattattttgtgtgtggtatactcatgccgtggcacatatatggagatcttagtgttagttctgtctttctttccaacccttggaaggcaaaaggaggaagatcaggagttcatgggccagcagtgtgctctgcagcagcactttgtaatacattcagagaaaagttcaaaggaaagtttactttgaatgcatgagatcctgggaatggactcagcgctgcgcagggcctctagaaaagaaaacttgttgttccttattgcttatttgttaaggaaaataatttgagttttgtttgtcatttaaaattgaactcgggagccaaagatggtggggcacactttcaatcaagcactcctagggcagagacaggcagatctctgtgtttgaagctagcctgttctacagagaggtccgggatagctagggggtcagtgatgtcaaaacaatagctcaagtccatgtgctcagacaactattctacttctgaattatattcccagcaccaagaaagacacttttttatatgggatcttctcacatagctcatgtttacctcaaattggctatccagctaaggattgacattgaacacctcccaaggacttggatcatagatgtatagaccatcataccaggttttacatgataactggggattgcacctaggacttccatgcatgctagacaagtgctctatcaagtcgtagccccaacactaagaatttattcttgaccaggtatggtggtgcacgcctttaatcctacactcaggaggcagaagcaggcaaatctctttaaattggctatggacttccctcgaattgaatataaagagaagtttctggaggaaaaagtataggaagaaatctgaactaagtaccatggctcatgcttgtaatcccagcactcaggaagctgaggcagacatactgctgcaggtttgaggccagcctaggttacagagggaaatctgtcttaaagaatacttcagtgtttggggtgggctgtgtagccaagcctcagtgtcaggctggatgttgaaatgaaaggcctctagtggtcttctgtatggttgactgtggagggtcacttatagctgacatctgtgaatgtcctacactgcaggctcacgggatgggtctatgggactctgggaggtgacagatgatgtgttgaccaaaagtgatgcaagacataacgtgtcaccagtccctgtgtatgctcacatcactcacaaggccttaaaggatatccccaaggaggatacaaacccggacaactgcaaggtgcgggctttagccttcaacaacaagaacaaggtatgaactcgccaagggattccagcagcctgtcccttctgactttatccttcccctccaaggcagtgcttgctgtgtaacttggttttaaatgcccagagtgtgtcttgagaggccgagggatgctggtgagcggttacaactgaggccgtgaagcccagcctgtgtctctgctgtatttgtctgtgtagagcatgtttgtggtcataatttcccgggaccactctaagctgaccctgcttcatttgcatgtgccttttcaggtgctctgttttgggtttgatttgcatactggccttgtttctaagctccccattttgactgccctctttatctcacacctccaaccgatcactgggtgaaacctcctgacaagtgaggagggtgtaagcagaatccaagagtggactcagagcccagagaggagacaggcttctgtgaaatctaaaacggacacaatttgattcatttaaaaaaatatttacgggctggtgagatggctcagcgggtaagagcacttccgaaggtccgaagttcaaatcccagcaaccatatggtggcttacaatcacccgtaatgagatctgaagccctcttctggtgcatctgaagacagctacagtgtacttttgaataataataaattttttaaaaatttacatgtatgggtgtcatgcgtccatatttgcatgggtgtatgtgcatcacatacacaagggcccaatttgaaaggtggttcactagaagtaggtttctctttgcacctacacaaaagcagtctttcacctgcgctgcgctctaacctgcttagggatgtcaggaagataaggagcgcagaaaggactgttttacccacagatgtgtgcctgtgtgcttgtggaattgcatatactgtgtaacggcggcacgtgggtgtgtgagagcttatcatctctggcatccttgggataggagggggtgggggggagccccagctctcagcttcttcccctgtgtagtctggtgcttcagtttactgcaggtcatgtggtaacttcttttctgttgctcttgtaggagttgggagcggtatcactagatggctactttcatctctggaaggctgaaaataccttgtctaaggtgagaacatgagttggtagttctatataatttaccatagggctagaatactgtctttctcccagagtcatagtggatttgcccaaaacaccttttgcccaaggtctggggatagaattgtgaagaacatgaagttatgagttttaatttggggctggtgagatggctcagtgggtaagagcacccgactgttcttccaaaggtccagagttcaaatcccagcaaccacatggtggctcacaaccatccgtaacaagatctgactccctcttctggtgtgtctgaagacagctacagtgtacttacatataataataaataaatctttaaaaaaaaaatgagttttaatttattccagtctggccttaagcttgttgtcttctcgcctctaaagaacctctcaaagactggaaaatactgacagccaccgcctaagcaagcaaaggcctttcttttagactggctctcagtacagacactctgaatgcactaacccaggacgcctgatcctctacctccccactgtagcaccaaggaggccttcagagaggcctcagactgcagggtgcctaggaaagttgccctttgtattagtgttctagtccacagcatatttaagcactggtttgtagagtgactgtctggtaaggttgtcaaggtggaaaaacctgaatgttaggaactcctggcaactgaaaattaatcaaactaaaatagtctcttaatcttgttagatgatgagaaaatggagtggatttttgttttgttttgttttgttttgttttgttttttttgatatgctgtttctctgtatagctcaggctgtcctggaactggttcaggctagcctggaatttggaaattcatctgcctctggcccctaaacactgggatcaaaagcatacaccactatactcagtttgggtttttgtgttgatgaggtcatactatgttagcaaagctagactggaattctataatccaggctgccctcaaaccagtgatcttcctgcctcagcctcccagatgctcagattacaaatgtcaggtgccaccccaatggttttggggttttgtttgtttgtttgtttgtttaagatttgtttattttacatatatgagtgcactgtagctatcatcagacacaccagaagagggcatcagatctcattacgtgtggttgtgagccaccatgtggttgctgggatttgaactcaggacctttggaagagcagtcagtgctcttacccattgagccatctcaccagcccaggaaagtcttttaatgagacccgagattgcaacagcacagttaaaaaaaaaaagatttatttataatacttgctagcaacgtttttgtacagtaaagtcttcttcacgtcttgcctgtgctacttataacatctgtaataagctttttgttgggaggagataaggctcagggaattgacagtctcctgtgtcacggcagctttgcgctccagtaggcttgcaggcagagactagactttctagtcctcaaggatcaaagatgaaggctgcctcagtttacctgggatggagtatactctctctggcttacagagggctcagtcatagaaataaactacagttcttggcttttcctggcattctgataatttgattcctgttttccctttcccctaacccagaagttactagtttactaggctttgtcttgtccctgacttaggtagtttgtgtgtaaaggaagcctacagatgaaggaacacaagagcagtgcccattttatgttatcgtgaatgtgtgtatcttctctattcagctcctttccaccaaattgccatattgtcgagaaaacgtgtgtctggcctatggtagtgagtggtcagtgtatgcagtgggctctcaagcgcatgtctccttcttggatccacggcagccatcgtacaacgtcaagtctgtctgctccagggaacgaggcagtggtaagtccctatgtgttcctgcaggcttatagctacattgaaatgggttttcacctttttgtttcttcttagatttgcaaacaagatcagggactcctgtgtaacacttagaagtatttggtaacagaatagaggaacttagttacctgtggcaacagagtgtccaggctgtagaaacctttggttcaaaccactgtgaggagataagcagtgagcactagtcctccagaactagcctgagctaacgttcttccaaactgagtaacactggattggtgcggggtggagaatcagaagagcgtgagatcacttttggatgtgatgataactatgtacagtgtacggtttgacaattatacctcgagaagccaaagaaaatgcttgttttgttctgaggagtaagtggggaatctgcttgcgtgcaaatggcctgcctctgagctgcacccgttcccagcctctgcccagatttcgtattctaagggccgtcgctcaccttcctctgtggaagacttgtgctgctgttgtctctaaggcttcagagtcctttgttctgatgactcattttctccctccaagaatcctgtgtaagaaagcagatgagacgagtgagtggttaagactgctgactcggaggccctgagtgcaggctccagttcccatatgaaatgctcacagcagcggggcgtggtggcgcacgcctttaatcccagcattaggaggcagataggaagaggctagcctagtctctacagtaaattccaggctcatcaaacagggctgtgctgtgagactgaaccacagtgcttaggtaagttaccagatccaggagccgtgaaggtctgaagaccggccaatctaaagttgctttttttctttttctctcccctttctcatatcaaaaactgtagctagccgggcgtggggaggcagaggcaggtggatttctgagttcgaggccagcctggtctacagagtgaggtccaggacagccacggctacacagagaaaccctgtctcgaaaaaccaaaaaaaataaaataaaataaaaaaacaaacctgtagttatcctgggagtcttggaaggaacattaggggttacagtgtagcctctttttctaaaagtgttatttctgtgtagataacacaaaagcagtttttgggtttgttggtggcggcagtgtttgttttccccgagtattgctatggaaggcgggtaccatgctgctgattgaaaggcattggttctctccttcaaaggagtcacaggaatcaaagtcgggtggttgcttggtagccagagccctttaagtggtcaacatatgtatattttatgccagagaacagcggatatattgaaatctggggctgcataatggtgtacagtgaaaagttttaaaaggttttatttttattaccatcatcattataattgttttgtttttgagacaaggtctcagtaggcatccttggctagcctggattttggtgtgtggaccagactagccttgaattcacagagatgtgcctccccaggactgggattaaaagcatacaccagccgggtttggtggcacacgcctttaatcccagcacttgggaggcagaggcaggcggatttctgagttcgaggcagcctggtctacagagtgagttccaggtcagccagggctacacagagaaaccctgtctcaaaaaacaaaaacaaaaaaacaacaaaaaaaaaaagcgtacaccatcatgcctggcttctaaaacgttttggttactattaatggatgtagtttgggtaaagaaatactagttcacaaaagtccctagctccacacagatgtcaggaggctcctgtatccattgtacttaatccacaggtacagcaggtgtattttccctttcatccaaagaagatggtaacttgttgtaaataacagtcctgtcatgctggtaatatgaagagaatagtgagctacagtgtacgtaatgtaatggagaagagctaatagttgtgaaaggtgatgccagtgctattggaggcatagcaccaagaacccagacacacttatgttctttggcacaaaacaatgtagattttcccagtaatctggctcattagcagagagttctgcttaaccattggcacagtgccatctgacatttcgggtgtacaccctctaattgctctgtgtttttctttctcagggattcgatcagtgagcttctatgaacacattatcactgtgggcacagggcagggctccctgctgttctatgacatccgagctcaaagatttttggaagagaggctctcagcttgttatgggtccaagcccagactcgcaggggagaatctgaaactaactactggcaggggctggctggtgagtaagcccagacctgagaggatggttgcgtttcagggagggattgtctaccctccagtcttccctcctcgattttttgctgttggcattccgtagagcagagaaaggctccgtccctgactttgcctttgtgtctgcacactggctccaggggaggaggaaggtggtggggcagatgtttgtaatctcggctctctgtaaactggaggaggagggtggcaaaaaagtgaaaggcctagaaaaatatgctggtgcctcagattttctccaggtgacagcagagcaggaaggctaaggaactgtctgccattgctgccagtgagttatcattaacaaggctgactcggaaaagctgtcttgggaagacttgctttcatgtaacaattctttttttttttttttctttaagtatagactagagtttattaagggcatggggaggggagttaagagggtatagaggcagagaaagagagagtagaggagtagaggccggccatgaacacgtggcgggggggtgaggggacagagggggagcaagaaagcaagagctcatgtaacaattctttatctggtaaaaatgaggcccgtttccttgagaaccagttgtgtgatggcgggtgatagacctcctgcctttggcagagaccagaaggcctccctgtcccttcttactctttcctagaggtactaaccgtctcctcatcttcccacagaatcatgatgaaacctggaggaattacttttcggacattgacttcttccccaatgctgtttacacccactgctacgactcgtccggaacgaaactctttgtggcagggggccccctcccttctgggctccacggaaactatgctggactgtggagttaatgacaactaactttctcccaaaatgcagatttacactaacttccaccctcagtttccttgtttgatttccctagctgtggaaggctctcctgtctatgcaaacagagtttgcttgtgggtcaggcagttactaggaagaggctctatgcagaaatccaaaagctgggacgttctacgtcagttggtggcttgttgttctgggttttttgtttgttttcactttgcagtaattagaattttacttttcccttttctgctttttaaagcaaacactgttacaatccctttttattttttcctctccttcctctggcttctttacactgaaatgacaaagtcattcttacccttacttcactgaggtagggcccctttataatcgtgtggtggctgtccgactttctgtgaaagtgtgggagcctttgtgtgcgtgtgtgtgtgtgtgtctgtctgtgtgtctgtgtgcgtttgtgtgtgtgaacttgtgtgcctgctggtactgcatcactgatactacttggaatgaggattatctgtaattaaagtatttataaaagaaacaactttactcagagtccagctttgggactagcctgtatcttctttaaggtccgacattgtaggaagagaaacagacacaccaggaaaacccttgagttagagaagccggatgggaggggaggctgcatcccaggactccaaactgtccaggcctacctgtccttccacccacgcaggaatgcccatgtgtgtgttacttccactcccgacctcctgtctgctcgcccagactggggactgcaggccacatcacagcctagataaagacaatcctctccccagcctcctgcctctgacagggtctgatctgaccgagagcaggcagtctcgagcttgtgtgcttactgctcatgacttggaggaggaacttttccattcttggggttttgctggtattttctaatttgtctgtccaggaaggtgtggtttgtagcgagtgctttgtgtgtgggatctgttctcagtgcagcagggcttagtgttggaagtcactgtcctgctctgttggctcattcctagggtagtgacaggtggctgtgccagcatcgctgcatgtgacagtgtagctgtgattggtaatttgcttgtttctctcaaactatttagtgtgaagagttttttgttgttgtttttgtttttaacttgcaagccagttgttgtcttccgaacatcatgtggaaaggaagctctccccaccctagtaccctgagacacacagtgctgcctgagaaatgcagtcatacacctgcacccagtttctcagttgctccccagttcttccatgctctctttgtgtcaaatgagtattctcataatggctggggctgctggggagggaagcggcaggcccaccgtaggacacagcatcctccacaggttttagaataatcatcctataatctagagaaataggtgctatcaacaggaaattaagcaaaatgctggatgctgtgaatcttttgtcttaatttttttctattcttaaactacaggctgtagatgtcttagttctcacagaacttctgtctttttaaactgacttgtgtgtttaagtaaacaaaactcttgtaggatgttttgtgccattgccagtccgtctcctgtgatgcttttgattgtcttgagattttctgtttttaaaaatgtagcatttgacttttttgccaaggaaaaataaatactatcccagtgcagagctgtttgagtgactatatatggcaaagatgctgcagggagcagacccgaaggattggtgagggcatgctaagatttttcagagttacctagaaaggcttgctcctgcttcccggctctaggctctggggtgcaactgagggcccccgtgcctagagcaagtagtgtagtacctgaaagaaacaagtggttctggggccccgtctgcttcactgagggtgtcctgagagtgactagaagtggctgcatagtggcctttcttgcaattaagaccacactgaatggtcttcccaatgctgggggcttgggagaagactgctaagtcacacgaccaaggctttccagggcaagcaggctgtgctgatctttgcatttgctcagaccaaactcacactgggaccttgataatcagattgcaaaacagaagagggtgggtaaattagttaaatcaatttgagaatatgtcttacaaagagtgacatttggacaggacctggaactagccttaacacaagttggagtacaagatctgaacataatattccattgtgtgggggaaataaacagatatcaggagttggagagagacggctgtgcagttaagagcatttgttgctcttttggaggacttgaatttggttcccagcacttacatggtagttcacaaccatctataactccaggggatccaacaccttcttctgaactccaaggccagcgggcattcatacatgttacatacacatgtatgcaggtaaaacactcatgaaatcacctttttaaaatgaccactgatggcccagagagatggcttcagcacttaagagcacctggctgcacttccaaagaactagggtttaagtccaagaacccacgagacacaactgttatctccagtcccaggggaatctgtacttggctgtgtgttgcatacatgtgatgcagaaacatacatgcaggcaaaacacttatacacataaaaatggtaaaatgctaaaaaaattttttaaatgacttgtgaggtgaacttggcattgtgctcactgtctaggcaaggatgactttgaaggccttattttcctcaccatggcctcctaagtgctgcgattaccccaaacaaggcggctatgtcactgtaggacactatggaacatgttcagaaagctgatttagcagatgtgccgtggacttgccctggacctctggcctccatggaatcttggccctcttctccttttccagtcagatttagtagcaagctacataccacagaggggctttgtgggttttatggcgccctggccctgccagcagcccctcctgccaggccatgaaagaatctcctgttcatttccgagccacgcgctgcctgcttcattcctcaggagctgctggctcctcctgtcatcccctgggttcttggctgaagagaattactagctcttcaatgttcactaatgttcctgttcctctatgatttgggggttggggggtaggccatatccatcgtggtcagagcacaggctggccttgaactaatctacctcagccccctcagagctggctctcaggcatgaactaccacacctgacagagttaaggatttcagagtctaatactcatcacctgagctcagcatgtgttttctgtaccaatcattaactgtgtatagatctgtaattaacatcctatgctgcagtcaggaagaaaactcaactactgccttctgtgacctccctcacaactccccagtcagaggactgggaatagtgaatctagtgctaagatttagatcctaagtggccccccaggttcacttggtagagacttggtcccctgctgatagtactcggttgagtcttctaggaggtgacagaaaatggagggaaattagagcactgggctctgtacttgaagatagaggaccctctcctttttctttcttgtactctcaaatctcctctccccagctgggtttcttcaacacacagtcccagctatgaagttcagttttgccacaggccctaaaacaatgggaccagctacctataggcaaattacacacacacacacacacacacacacacacacacacacacacacacacgaaaacctggagggaaaaaatgaaattaataaatgaataaacaagtcatggtgttgccagtagtgcttgcttgagagatgggagcagaaggatcaggcgttcaatggaagtctcagctgcatagttgaaagtcagcctagctacatgagagcttgtctaccccccacacaaagataccaagaagactggacacaagagcacactcctttaatctcagcactcaggagtcagaagtagactgcattggaggctagcccgggctacagagcaagaccccatctagtacaacaaaacaaaaggcgtcacacataaatgatttatctccagtattttgaggttcggacatttgccaatagcaaagctgatcgccttggtgtgaggtatggtgcaggtttgggtcctcagtgtgttccctgagtaacatcctcataatttttctgccctctagtctgctacagtaaaagtgatcatcatgtagagtgcatgtttgtttgtttgttttggggggggggttggtttttcaggacagagtttctctgtgtagccctggctgtcctggaatttggtcttcaagttagcctcaaactcagagatccacctgcctctgcctcccaagtgctgtgactaagggtgtgcaccaacaccagcacccagctagagtgtattttaaggtactaacacagatccctgagaaaggacccctgctcctaggtgccatctgccaacactgagtatgaatgagagagaaggggctggttctagctgtacagctgcttagggctgtggactcaaaatgaggccctgcactgatggggtgtgtgtggcgggggacggagggatactgttgtgtgaatgtgtgtgtgtgtgtgtgtgtgtgtgtgtgtgtgtaagcatgtgtgagtgtgtttgaatgtgtgtattagtgtgtgtgtgagtatgtaagtattgtgtgtatgtatgtgtatatgagtgtgtgtgtgagtgagtgaattagtgagtgagtagaaaaagcaaaatatagagaattttcctttgatttctggggattagcaggtactctaggcaggcgtgctggtgcagatggatctaaggacaggtgtctagtattagccagacaacaacactacacagtccatgtctgtaaataaggaaatgaccacagtacttgtgggtcagtgtcatcacaaaacagaccagcaactagatatggtggtgcacacctgtaatcccaacattgggaggctgaggcaggacgagtatttacctttgggtagctacacagttcattgggcaacaggaaataacctcaaaaaaaaaaaaaagtagctttgtatggtggcatatacctgcaatcccagcactgaggagacaggctcccagaagttttgaaactagcttgatctacatggtgagtgctaagccatatagcaatactttgtctcagaatcatacaaacaaaaaaaacaaaaaaaaaaaacaaaaaacaaaacaagggctagagatatagcccaattgtaaaacacttttgtctggcatgtacaaggtcctgaatttaatccccagcacaaacaacagaaaacaaagaacccctccccacaaataagccaggactatggtaattctagcattagagagactgaggaaggaggactgagttgagttcaattcttagtacctcataccaggtaagtggctgacaccagtttgtagcctagtgcacataggcaggagaatcagaggttcaaggtcaactctggaggcaggggctgcggaatcttttaagttttttaatcttttaatcttttaagacacccacagtgatacacctactccaacaaggccacacctactccaacagggccactccttgggccaagcatatacaaactatcacagaaggataaccagcctggtctacaaagtgagttccaggacagccagggctacacagagagatcctatgtgggaattaaaaaaaaaaaaaaaaaagttcaatgtcatctttggctccctctttctgtctctgtctctgtctttctcctattccctcttctctcagccaggcatgatagcacatgccattaatcatcagaacttgggaggaagaggcaggaagatttctttgaattccaagccagcctggtctacaaagagaacccaaggcctgtctcaaaaacaaacaaacaaacaaacacaaaaaaatacagtcatacatatttatacacatagcagaaacctaaaatatcatctctagatttgtccatagttggtatctgggcaacacagacacatttgccaaccttcagttgggtgcactggcaaatgccagtaatcccagtattattaattatttggaagagacaggaagattgccatttgttaggtcaacatagacaaaatagccaagttcaaactaatcattagcaagaccctaattctatatcacagaatgtggaggaaggagaaggaaaggaaaaagaaaggggagtttactgtacttcaagggtctctttgagaagctagatagtctgtttagccttgtgtgaccagagaatccatcacattcccagtagggggagccagaacttagccaaattctaaacgcatcactcttgactcaacacttaggaagaatgctaaagaaatcgtgcccccacagatccattataaaactttgtttcaaggtgcacctgaaccacctccccaaccttccaaaccccattgttaggactgaggagggacgaggcaagcagagctatagtacttcagttattactgaagttctcagagctgtaacccctaaactaaccttccctatgatttctgtatagattggtgtataaaagcatgtatatgcacacaacttcacaaaaatgggtatttaaagctgtctgggaagcctggtaagatgagatatgcttataatcccagaacgtaggagcctgaaatggaaggtgtcttaggattttactgctgtgaacagacaccatgaccaaggcaactcttataaggacaccatttaactgggactggcttacaggttcagaggttcagtcctttatcatcaaaatgggtacattggcagcatccaggcaggcatggcacaggcaaagctgagggttctacatcttcatctgaaggctgctagcacaatactggcttccaggcagctaggatgagggtctaaaagcccacacccacagtgatacacctactccaacaaggccacacctactccaacagggccactccttgggccaagcatatacaaactatcacagaaggataaccaagactttgaaaccaatctgtgctatctgtcttaaaacaacaacaacaaaacaggccagcataaaaaacacccagagctcatgtaaaggtggaaggagacaaccacagagtcgtcttgtgctctctgcatgtggaccacgtcatgcatgagcctacacatatcacacacacacacacacacacacacaccacaacatgccaggtgggtactagggatgtagctcagagctagagtacttccctaatgcccagcactgtaaaataataatgacaataagaaaataaagccatatgtatatttctatgtaagaaatgggctgttacccacttccgtgaatgaaattttacagaagttacattagtggcatctcctagtcgttggagtttgggtgatgttcctgtattctgtttgtttgatttgggttcttggtagttttgtttgtttgtaaaggatgataagttttcaatttacttaattaactgtacttatttattgggggtggggggaagggtgtctctgcacgtgtttaggtcacagggcaagcggtgggagtcagttttttccttccattgtgtaggtcccagggaactaactcgggtggtcaggctcagcagtggacgccttctgagcccctccccctctctttgggggtgggggtctcactgtgtaatcctgtctggcctgactcactgtgtagaccagcctggcctctaattctcagagatcctccttcctctgcttccccaagtgctaggattaaaggtatatgcacactctgcctggctttaattcagctttttaaaataagtttgcactataaatgggctttgaagttgtcaatctcctgtctcagtctcccaggtcaaccatgcctggctctaggcagctggtcaattctaaataagcagttcattaactaactctctctggacgaatttgaccttctttgatcaagtaaaggagtaaggcgttcttcaggctttgaaggaccagagtcatttactgcgattttatactggatttacagtcctggggagatggtcgatctctttcatctgaactcagccagaataaccacgagcaacgaggaagagaggcactgattagagataacttcaacacacagcttcaggccctcgaggctcccaccaggccattagccaaatgctgacctggagcctcataattccttccggttggagtctacactgtataaccacagtaaggcgagagagaggccagccacgaaagggacgtaagtggcttttctataggactcagggaactcagagcaacctggaggaagaaactgaaaacccattgtctcagtaactctgaggaacgaagctgtcccataggaatgaggccctaggaatggaggaatagaggactcagctaccactgtgagctccgcagaacagggcaaaaaggcaaccacagttttgcccccggggactacagcactaaaagatccaattgggctccatttgttttttgagatttgtgctagtgtgtgtgttcctttttgtgtctcctggacctctgtagctggctgggactaaagttgaaaggagcattcagtagggctcttctctggcagggcaggtccaggcctgtagaaactggtttaacctgcttcccagagtctcattgccacttaagtaatctcacgaagcagaagcagaggggctctgggtcaagatatagccaaagagatctgttttgcttgcttgtttgttttgagacagagtttctctgtgtaacagctctgttgactaagctggcctggaactgacagagatgctcctgcctctgcctccctagtgttgggaataaaggagtgcaccaccactgcttagcccccattttgattcttaatctctctccctcctgttttgaactcctgagctcaaacagctttctgccttaggcctttagcacgatagcaggctagagttaatttttcctttcctttttattggagattcaaacccaaggccttatgcatggtaggaaagttctctacccagctccatttcaaatccttattttcattatttttaaccatgtatatgtatgtctttgtactgtgcatttgaatgtgtgggttcctccagaggccagagatgtgggaccccctgtagttggagttacatgggtcctgggaattgaacagcagtatatatgctcttaactgctgagccatctctccagccctacctcctccagtgctgtttttagtttgaattcccttgaattgtctcttgaagaaaaggtttcctgtttcctccaccaaggtttgaggtgggacttgaacagccacagagggtcaggcttgcctactgtagatttggatatccctccctccctccttctctctctctctttctccccctctctccctccctccttctccctccttttttttgttttttttttttttgtttgtttttttttgtttttgttttttttaaagacagggtttctctgtgtagccctggctgtcctggaactcactctgtagaccaggctggcctcgaactcagaaatcctcccaagtgctgggattaaaggcgtgtgccaccacaccaggctttgatttaggtttcttgaaggcagggtctaagctgttgtttaaatatctatcaatctctatatcgaatctatctatcaacctatgtcatctacttattatctatctctttctttctttcttttttttttttaagatttatttatttattttatgtaagtacactgtagctgtcttcagacacccccagaagagggcatcagatctcattacagatggttgtgagccaccatatggttgctggaatttgaactcaggacctttggaagagtagtcagtgctcttaaccactgagccatctctccagccctatctatctctttctattgtctatcaatctctatcttctagcaaactctgtcctctagctagggagctgctggtctgtaactaatcccgagtctgtaacccagcaatacttttgcctcagtttccccagtgctgcaattacaggttgtcacagtctgtctgcaattacaggttgtcacagtctgtgttggtccaggaaggcttggctccctaccctgcatgtttctgaagttttactgtatcttactttcccagaagtttactgtgttacacactctaaggccaaattagggtggtaaagagcagaagttgaaattcggcaggtggaggtggggacaagcctgggacagcagccttgggagtggaggcaaggccaggtgatggggaggaatgagaaggccaggaaggctgggcttatttatctccattgagtatcttcctgtgagttcctgcagacgtgttccatttccattggctctctgctcctctatgctgtcccctctggcccagtagcaatctagtctttcttccttgaaaaatggccccgaggtactgggacaaatcctgtaactttttttttttttttttaaatcaagctcacttcagttatccatcagtgtctagatattggtaggatgtcctagagatctgtgagtgagactttgggcaagctacccaactcctcagtgcttcggttccctcatatataaatattcccaggagaagacacagctgtaaggtaatatttggttctaagttggtaacaaagtgattttgttcgttcatttttgttgttgttttttttttttgtttgtctgcagtactgctaccaccgcctggccacaaggtgaagatttaactattagaggattcaaccatgaaggtctgggtatacagtgcatccctgtgaccccagcactctgtgcagaagcaagaagatagcagcaaattcaaggcctgcctaatgacctacctacaaagtcatacttaaactgagacactgacgctcagtagaagctgagcagaaggatagagacctgcaggccagcatgttctgtctagcaagtttaaggatagggttacataagggaacccccgtctcaataatataaagtaaaataaaataaaatgaagggagaagcttccctgaatacctgtcattgccaacatcggtccctaaatggcatcctgcacaggttgctacgcccagtctcaactgactgcacggagggtccacagttgtgtgtcctagagtaaccagtgacctatagctttccttgcgttaacaagttcagctgaggtctttaaaatgtttcacgaatttgtatttgagaagagacaacttgaaatagcaaaaatcttattaaatttttatttagtttttgtttgtttgtttgtttaggttttttgggacagggtttctctgtgtagccctggctgccctggaactcactctgtagatcaggttggccttgaactcctactgtatgtgtccttgagtgtgtgtgtgcattccggcatgcatgtgtcaatgtgtatatatacatcacatacatgtttatctacattacatatacatggttctgattttgagatggagtcatcttttaacgttttgtatatgtgtgtatgtgtatatgtatgtatatatatatatatttttttttttttgagacaaagtctctctacataggcctagc

SEQ ID NO: 839 - DNA, 3431 bp, Mus musculus
ggggcgcgggcgagtgggaggggggtgttttggttctcgccgctcgccgtcctttccagacacggcggtaggaaagctgcttgttcctgcttttccttccccttcccttccccttcccctttcccaacccggattttcccttcttccatttacgcgcctcattttgatcgactgctgcccgggatccgagccattttccgggccgggcgctcgaaagcgcgcggccccagggcccggttcatgacccgtcgccctgccgccccttgccttctccgcctcatgtggctgcggggccacggcggcgctgcccactatggcccggaaagcagttagcaggaagcggaaagcgtctgcctcgccaggagccgggagcgacgctcagggcccgcagtttggctgggatcattcgctgcacaaaaggaaaagactccccccagtgaagagatccctagtgtactacctgaagaaccgcgaagtcaggctccagaatgagaccagctactctcgcctgttacatggttatgcagcacaacagcttcccagtctcctcaaggagagagaatttcacctcgggacccttaataaagtgtttgcttctcagtggttgaatcataggcaagtggtgtgtggcacgaaatgcaacacactctttgtcgtggatgtccagacaggccagatcaccaagattcccattctgaaagaccgggaacctggaggtgtgactcagcagggctgtggtatccatgcaattgaactgaatccttctagaacactcctagccactggaggagacaaccctaacagtcttgccatctaccgcctgcctaccttagatcctgtgtgtgtgggtgatgatggacacaaggattggatcttttctattgcgtggatcaacgatactatggcagtgtctggctcacgggatgggtctatgggactctgggaggtgacagatgatgtgttgaccaaaagtgatgcaagacataacgtgtcaccagtccctgtgtatgctcacatcactcacaaggccttaaaggatatccccaaggaggatacaaacccggacaactgcaaggtgcgggctttagccttcaacaacaagaacaaggagttgggagcggtatcactagatggctactttcatctctggaaggctgaaaataccttgtctaagctcctttccaccaaattgccatattgtcgagaaaacgtgtgtctggcctatggtagtgagtggtcagtgtatgcagtgggctctcaagcgcatgtctccttcttggatccacggcagccatcgtacaacgtcaagtctgtctgctccagggaacgaggcagtgggattcgatcagtgagcttctatgaacacattatcactgtgggcacagggcagggctccctgctgttctatgacatccgagctcaaagatttttggaagagaggctctcagcttgttatgggtccaagcccagactcgcaggggagaatctgaaactaactactggcaggggctggctgaatcatgatgaaacctggaggaattacttttcggacattgacttcttccccaatgctgtttacacccactgctacgactcgtccggaacgaaactctttgtggcagggggccccctcccttctgggctccacggaaactatgctggactgtggagttaatgacaactaactttctcccaaaatgcagatttacactaacttccaccctcagtttccttgtttgatttccctagctgtggaaggctctcctgtctatgcaaacagagtttgcttgtgggtcaggcagttactaggaagaggctctatgcagaaatccaaaagctgggacgttctacgtcagttggtggcttgttgttctgggttttttgtttgttttcactttgcagtaattagaattttacttttcccttttctgctttttaaagcaaacactgttacaatccctttttattttttcctctccttcctctggcttctttacactgaaatgacaaagtcattcttacccttacttcactgaggtagggcccctttataatcgtgtggtggctgtccgactttctgtgaaagtgtgggagcctttgtgtgcgtgtgtgtgtgtgtgtctgtctgtgtgtctgtgtgcgtttgtgtgtgtgaacttgtgtgcctgctggtactgcatcactgatactacttggaatgaggattatctgtaattaaagtatttataaaagaaacaactttactcagagtccagctttgggactagcctgtatcttctttaaggtccgacattgtaggaagagaaacagacacaccaggaaaacccttgagttagagaagccggatgggaggggaggctgcatcccaggactccaaactgtccaggcctacctgtccttccacccacgcaggaatgcccatgtgtgtgttacttccactcccgacctcctgtctgctcgcccagactggggactgcaggccacatcacagcctagataaagacaatcctctccccagcctcctgcctctgacagggtctgatctgaccgagagcaggcagtctcgagcttgtgtgcttactgctcatgacttggaggaggaacttttccattcttggggttttgctggtattttctaatttgtctgtccaggaaggtgtggtttgtagcgagtgctttgtgtgtgggatctgttctcagtgcagcagggcttagtgttggaagtcactgtcctgctctgttggctcattcctagggtagtgacaggtggctgtgccagcatcgctgcatgtgacagtgtagctgtgattggtaatttgcttgtttctctcaaactatttagtgtgaagagttttttgttgttgtttttgtttttaacttgcaagccagttgttgtcttccgaacatcatgtggaaaggaagctctccccaccctagtaccctgagacacacagtgctgcctgagaaatgcagtcatacacctgcacccagtttctcagttgctccccagttcttccatgctctctttgtgtcaaatgagtattctcataatggctggggctgctggggagggaagcggcaggcccaccgtaggacacagcatcctccacaggttttagaataatcatcctataatctagagaaataggtgctatcaacaggaaattaagcaaaatgctggatgctgtgaatcttttgtcttaatttttttctattcttaaactacaggctgtagatgtcttagttctcacagaacttctgtctttttaaactgacttgtgtgtttaagtaaacaaaactcttgtaggatgttttgtgccattgccagtccgtctcctgtgatgcttttgattgtcttgagattttctgtttttaaaaatgtagcatttgacttttttgccaaggaaaaataaatactatcccagtgcaga

SEQ ID NO: 840 - protein, 470 aa, Mus musculus
PVPPLAFSASCGCGATAALPTMARKAVSRKRKASDGAGSDAQGPQFGWDHSLHKRKRLPPVKRSLVYYLKNREVRLQNETSYSRLLHGYAAQQLPSLLKEREFHLGTLNKVFASQWLNHRQVVCGTKCNTLFVVDVQTGQITKIPILKDREPGGVTQQGCGIHAIELNPSRTLLATGGDNPNSLAIYRLPTLDPVCVGDDGHKDWIFSIAWINDTMAVSGSRDGSMGLWEVTDDVLTKSDARHNVSPVPVYAHITHKALKDIPKEDTNPDNCKVRAFNNKNKELGAVSLDGYFHLWKAENTLSKLLSTKLPYCRENVCLAYGSEWSVYAVGSQAHVSFLDPRQPSYNVKSVCSRERGSGIRSVSFYEHIITVGTGQGSLLFYDIRAQRFLEERLSACYGSKPRLAGENLKLTTGRGWLNHDETWRNYFSDIDFFPNAVYTHCYDSSGTKLFVAGGPLPSGLHGNYAGLWS

SEQ ID NO: 841 - DNA, 60729 bp, Homo sapiens
  misc_feature (1)...(60729): n = A,T,C or G
nnnnnnnnnnnnnnnnnnnnnnnnnnnnnnnnnnnnnnnnnnnnnnnnnnnnnnnnnnnnnnnnnnnnnnnnnnnnnnnnnnnnnnnnnnnnnnnnnnnnnnnnnnnnnnnnnnnnnnnnnnnnnnnnnnnnnnnnnnnnnnnnnnnnnnnnnnnnnnnnnnnnnnnnnnnnnnnnnnnnnnnnnnnnnnnnnnnnnnnnnnnnnnnnnnnnnnnnnnnnnnnnnnnnnnnnnnnnnnnnnnnnnnnnnnnnnnnnnnnnnnnnnnnnnnnnnnnnnnnnnnnnnnnnnnnnnnnnnnnnnnnnnnnnnnnnnnnnnnnnnnnnnnnnnnnnnnnnnnnnnnnnnnnnnnnnnnnnnnnnnnnnnnnnnnnnnnnnnnnnnnnnnnnnnnnnnnnnnnnnnnnnnnnnnnnnnnnnnnnnnnnnnnnnnnnnnnnnnnnnnnnnnnnnnnnnnnnnnnnnnnnnnnnnnnnnnnnnnnnnnnnnnnnnnnnnnnnnnnnnnnnnnnnnnnnnnnnnnnnnnnnnnnnnnnnnnnnnnnnnnnnnnnnnnnnnnnnnnnnnnnnnnnnnnnnnnnnnnnnnnnnnnnnnnnnnnnnnnnnnnnnnnnnnnnnnnnnnnnnnnnnnnnnnnnnnnnnnnnnnnnnnnnnnnnnnnnnnnnnnnnnnnnnnnnnnnnnnnnnnnnnnnnnnnnnnnnnnnnnnnnnnnnnnnnnnnnnnnnnnnnnnnnnnnnnnnnnnnnnnnnnnnnnnnnnnnnnnnnnnnnnnnnnnnnnnnnnnnnnnnnnnnnnnnnnnnnnnnnnnnnnnnnnnnnnnnnnnnnnnnnnnnnnnnnnnnnnnnnnnnnnnnnnnnnnnnnnnnnnnnnnnnnnnnnnnnnnnnnnnnnnnnnnnnnnnnnnnnnnnnnnnnnnnnnnnnnnnnnnnnnnnnnnnnnnnnnnnnnnnnnnnnnnnnnnnnnnnnnnnnnnnnnnnnnnnnnnnnnnnnnnnnnnnnnnnnnnnnnnnnnnnnnnnnnnnnnnnnnnnnnnnnnnnnnnnnnnnnnnnnnnnnnnnnnnnnnnnnnnnnnnnnnnnnnnnnnnnnnnnnnnnnnnnnnnnaaataaataaataaataaattacttgatcttattaagtagaaaagttttgtctcttcctttattttcttattttattaaggttacagataaaagtaagactgtttaacaggcaggagcaacagaaaacaaggactcttgaaactttacaaactctatgatcaattaatgaatgattggaaattgtctgtactgagaatgatggctcgcacctgtagtcccaagtactctggaggctgaggcagaaggatcccttgagttgtgagtccagcctggacaacatagtgagaccctgtctctaaaaaaataaatgaaacagaaattgtctgtactgtacttaacacaaattctaccaacgtatgccaaattatgcataacatatagaaatagaatttctgctgtcaaagtagtagatgttctggataaaacatttcaggttctgaataaagaaaaaacatgagagtacaagggaaatgctaaaataaataccacttgagacttcaactggacccagatatttaatgtggtagtgctgaaaattatgggcctagcatggtgactcacgcctgtaatcccagcacttagggaggccgaagcatgtaaagcactttagctcaggagttcaagaccagcctgtgtaacatggtgaaaccccatctctacaaaaaatacaaaaattaggcgggcatggtggcctgcacctgtagtcccagctacttaggaagctgaggtgggaggatggcttgagcccaagaggcaaaggttgcagtgagctgagatcataccactacactccagcttgggccacagaccctgctctcaaaaaaaaaaaaaaaaaagatcccccgtcccaggcccgccggacccgcgctagcagcgtggcagcagcgtggcagcagcgcggcagcggcggcggcggcggcgggcggtccagcgggtgtttctctcgggtcgcagggtctcccagcagcgtggtggactacctgatcagcggtggtaccggctacatgcccgaggacgggctcatcgcgcagcagctcttcgccagcgcctaaggcctcacctaggacgccttcctgattctcccaggactcatagacttcatagctgaggtggaccttacctcagccctgacccggaagatcacgctgaagacaccgctgatctcctcccccatggacactgtgacagaggctgacgtggccatcgcgatggctctgatgggagatactggtttcattcaccacaactgcaccccagagctccaggccaaggagctacggaaggtcaagaagtttgaacagggcttcatcacggaccccacggtgctgagcccctcccacactgtaggtgatgtgctggaggccaagatgcggcatggcttctctggcatccccatcactgagacgggcaccatgggcagcaagctggtgggcatcgtcacctcccgagacatcaactttcttgctgagaaggaccacaccaccctcctcagtgaggtgatgacgccaaggctcgagctggtggtagctccagcatgtgtgacgttgaaagaggcaaatgagatcctgcagcgtagcaagaaagggaagctgcctatcatcaatgatcgcaatgagctggtggccattatcaccggcagcgacctgaagaagaaccaagactaccctctggcctccaaggattcccaacaagcagctgctgtgcggggcagctgtgggcacccgtgaggatgacaaatatcgcctggacctgctcacccaggtgggcgtcgacatcatagtcttggactcgtcccaagggaacttggtgtatcagatcgccatggtgcattacatcaaacagaagtacccccacctccaggtgattggcaggaacgtggtgacagcagcccaggccaagaacctgattgacgctggtgtggacgggctgtgtgtgggcatgggctgcggctccatctgcgtcacccgggaagtgatggcttgtggtcagccccagggcactgctgtgtacaaggaggccaagtatgcccggcgctttggtgtgcccatcatagccaatggcagcatccagaccatggggcacatagtcaaggccctggcccttggagtctccacagtgatgatgggctccctgctggccatcaccatggaggcccctggtgagtacttctcagacgaggtgcggctcaagaagtactggggcatgggctcactggatgccatggagaagagcagcagcagccagaaacgatacttcagcaagggggataaggtgaagatcgtgcagggtgtcttgggctccatccaggacaaagggtccattcagaagttcgtgccctacctcatagtgggcatccagcacggctgctaggatatcggggcccacagcctgtctgtccctcggtccatgatgtactcaggagagctcaagtttgagaagcggatcatgtcggcccagatcgagggtggcgtccatggtctgcacttttatgaaaagcggctgtactgaggacagcagtagaggccaaggtgatggagggggcacagcctccccccataactggagtggtccacagatttgcatttacgggttccccagctcctttccagggagagaggagggcaggccctgaagggtctccgggccctcgctgggcatcccctgcagagtcagggctgctccctgggccaggctgccctgggagccccccgagcccagccagccaggttctcaggccctgcacctgcctcaggtctttcttgctgcagcctgctccagcccagcccccatcccaggggcaggcagcccctcctggtttctcctgtagggcacctccctgcccccagcccccccaggaaatggtgctctcctggccctgcctctggcccttcgtgggccgctgccccctcagccatgtagcacttctgagctcctgacctaggccaaggggaggtctctgccctcttccccggccctgggctacccttgggtcctgctcctcaggccactcccctgtccctggccctggggaggaggctgccctggtcatggccacctgcctgtcattcctgactcatcaccgtccccagtgaaccattcctgccctctcctcagctgcagttgaaggctttaactttgcacactttgggatcacagttgcatcattatgtgttaagtaattggaataaatcaagcaggtctcaatgccaaagaaagaaagagaaagaaggaaagaaagagagaaagaaagaaaagtagaaaagaaaagaaaagaaaaaattttgtagaccagagttcatgggtttcagctctggcttatctcttgtctggttgcatgacttgtcatttttggccttagttttctttaaaactataagtttaagacatgagctgtctctctatatctaccacttttttttttttttttttttgagacggagtctcactctgttgcacagactggagtgcattggctgaatctcaactcactgcaacctccgcctcccgaattcaagtgattctcctgcctcagcctcctgagtagctgggattacaggtgtccgccaccatgcctagctaatttttgtatttttagtagaggcctcaagtgatccacccgccttagtctcccaaagtgctgggattacaggtgtaagccacctcgcccggcctatatcttccacttttaataacctatgcccagaatctgaaaaatatttccacagtgggtgaagtaattacgattccatgcctcagaggcctctcacatccctacgtcatcggagagccgtttttgtgcgcttaccatctgtgttcatttgtgtcctatgtcctctgggtctctttccttgctatgttttattatggttgtatgaattaaaatccaaaatcctttttcctaacagaaatactttcctcctgagctcttacttgcccctttgctagcaagcgtggttaattagctccaacacatgaagggtagagtcaaacagggaattgtattaacatccgctttgtttgttccaggaaacctatgcaaataaacaagagaaaattctgttactaagcaagtataacacaattcagtttgcccaaagcactttatagtatttcttattgtttattcttcctggcaagaccaaggcaagagaaggtaacaggtgcagatccattaatgaccctctagcagcacattgcattgtgatgaaatggttataagaactgaattggaggaatggggttagagaagattggaactgttggggtttttatttgaggctacaaaatagtatagtttgagggccagacactgtggctcatgcctgtaatatcagaactttaggaggccgaggcatgcagatcacttgaggtcaggagttctagacaagcctggcaaacatggggaaaccctgcctctactgaaaatacaaaaattagggccaggagtggtggctcacgcctgtaatcctagcactttgggaggccgaggcaggcggatcacctgaggtcgggagttcgagaccatcctgaccaacatggagaaaccccatctctactaaaaatacaaaaacattagccaggcgaggtggtgggcacctgtaatcccagctactcaggaggctcaggcaggagaatcgcttgaactcaggaggcagaggttgcagtgagctgagattgcaccattgcacccagcctgggcaatgaagcgagactgtctcacaaaaaaaaaaaaaaaaaaaaaagaaaagaaaagaaaaatgaaagaaatttccaggctaggcatggtggctgatgcctgtaaccccagcactttgggaagccgaggtgggtggatgacctgaggtcaggagtttgagaccagcctggccaacacggtgaaaccctatctctaccaaaaatacaaaaattagccaggtgtggtggcgcaggcctgtagtcccagctacttgggaggctgaggcaggagaattgcttgaacccggaaggcagaggttgcagtgagctgagatcgtgccactgcaccccagcctgggtgggagaatgagactctgtctcaaaaagaaaaaaaagaaatttccagaacctcagaaggctccctgaggtcccctgccagttagtaatcccgcttaagggtaatgactgatttctcttaccatggatcagttgtgcctgttttcatacttcaaaaacatgaaattaggcatttactaattacatttaggaattactgctttggttggcctcagtgtctcatacctgtaataccagcactttgggaggccaaggtgggaggatcgcttaagcccaggagtttaagaccagcctgggcaaccaggcgagaccctgtctctacaaaagataaaaaataagctgggtgtggtggcacatgcatgccatgccactgcactccagcctgggcaacaaagcgagaacttgtccctcaaaaaataaaaataaaaaaaggaattactgctttgtgtttgacttttttggagacaggtctggatctcccaggctggagtgcagtggcatgatattggctctccacctgcaacctccaccttctgggctcaagctatcctcccacctcagcctgccaactcccaagtagctgggactacaggtacatgccaccccacccagctaatttttgtatgtttctatagagacaggattttcccatgttgcccatgctggtctcaaactcctgagttcaagcaatctacctgcctcagcctcccaaagtgctaggattacaggggtgagccccgtgcccagcagtgtgtttgatttttttttcttttcttttctttttttgaaacggaaactcattctgttgcccaggctggagtgcagtggctcgatctcggcttactgaagccttgatctcctgggttcaagcgattctcctgcctcagcctcctgagtagctgggactactggcgggtgccaccatgcctggctaattttgtatttttagtagagagggggtttcaccatgttggccaggctggtctcaaactcctgacctcaggtgatccacccgccttagcctcccaaagtgctgggattacaggcgtaagccaccacccctggcctgatatcttttatgcaatattataaaattcattcacacagttttgtcaaggtgaaataaaatatatagatgaatctctaaaattaaaatgttttgtgaagcaggaattgtaattcagggcacacgcagactgggtggtctttgccatgtctgcagaacaaagagaaggttggaagttttgtaaaaaggaagtgttatgtattgctcttcaagaaagttcactggcactagtaaggttttggagagctggcaagttttgattggtaagtgaaggcaataagtaaaactatttctgagagtcacagtaggttgttttaacagctattagataaaactgctttcagattatagcacgcagtttcagcagtgaggctcactaagaatgccattcttggagtagttacatgccctgagtactttttcccccagccactctactactttattattgttatcattattattttattattttattttttacacagggtcttgctctgtcaccctggctggagtccagtggcatgatctcagctcactgcaacccagctactcaggaggctggtctcgaactcctgacctcaggtgattggcccaactcggcctcccagtgtgctgggattacaggcgtgagccaccgcacctggcctgcagtcttttaaaggcaattgtcaattaaatttccaaaatggactttcattctgttatttgaatagaaatggtgagctcttggccagccgtggtggctcatgcctgtaatcctagcactttgggaggccgaagtgggcggatcacctgaggtcaggattttgagaccagcctggccaacatggcgaaaccccatctctactgaaaatacaaaaattagtgggcaaccatcctggctaacatggtgaaaccccgtctctactaaaaatacaaaaattagtgggcaaccatcctggctaacatggtgaaaccccgtctctactaaaaatacaaaaaattagccaggcgtggtggcgggcgcctgtagtctcagctattcgggaagctgagccaggagaatggcgtgaacccaggaggcggagcctgcagtgagccgagatcgcaccactgcactccatcctgggcgacagagcgagactccgtctcaaaaaagaaaaaaaaaattagctgggcaacgtggcgagcacctgtaatctgagctactcaggaggctgaggtaggagaatcacttgaacccaagaggcagaggttgcagtgagccgagatcgtgccactgcactccagcctaggctacagagtgagactccatctcaaaaaaaaaaaaagaaaagaaatcgcgagctctgctataaggtacatttggggatggttcctaggttgtgaagatgaagtaaaggaactttgagaaagagactgcagcagtgcccagtgtgcccctcttggcactgacagcccaatctgagcctagagattctcaaaggattccagactcttgcccaggggctcttgggtcatccagagcattgcggggcaagacagaattagaacagactcaaaaaagaaagctgacccactcctgacccactcactatgtgcatatctctaaagggacaggcctgaccaaataagatggagctgcctttcgcaagacattaggggttagtggtagtgccgacttgggatggcaggagaccctgcttcaatctggtctttgattcggcttggaaaacaaatccaaatctccttgttgacagaacttgagatggtccaacagagctccttggaggtatgaggcctgaggcctgaagcctgaagtgaccagcaggtaactgggcaccacagcctgaggccaatcagccccaagcaagagcatcctgcttcctcagagggtttgtttgcttgaggaaagcgaaggctggcagtcatattccttcaggatcttccaaaaatgttggcaagggtgatcctgatgaagcccccttgtttggaggccaatgccagctctaactggactggcaagccaaaaatgaccactctctttcctgtagttcagaattcccgacctgccctaatggagacgcaacctgaatccaagagtgaggcaggcagctacagataagtttacagcgtgatgactacttcataaagcacaaaagaccatgtggtttagatggcaggtcatggaaatctaaagggaatggtgaagttgcaccgtaaggggaaggtgactgaggagctgaaactgactgaggggctgaagcatttcggacaggagaaaggatcaggaggagacagagcggagaatggagcctcagggctacccagcggtgggaagagggtagccagagactcgtagggcggcctgggttggttgtgctgggcaggttctcagtggtgggaaagtctggccacactgccctgacttcctgactggacttcacctcgagggtgggagcggttcctgccccccacccccccacccccctgtccagcccttggagccagggcacggtttgtgacagattcagggaaacgtttggtgccagatgggaggtaaccgggttaaggcctgcactagggaggattccttcccccagcagcactggtggtcctcacttccgggtgcctgcggataggcgggctggggtcggaggtcggcggccagaagccagattcccttggccccagctcgtccacttccatccagcagtagccaaacaaccgttgaaaatggcctggcggcggccgggaaacaccagagaactatcttccaacccctagatcccgcccctctcgttccggcggtgtttccgtggcgacgctatccgaagtgcggctgcgcaagggtgacggcgcgcgagcaagggggagggggtgttttggttctagccgctcgccgtccttgcaggctctgccgtcggaaagccgctcattctcgcttccccttccctttcccggctcaagtccttcctctctctttcctttctttccgcctatcttttttctgctgccgctccgggtccgggccattttccgggccgggcgcactaaggtgcgcggccccggggcccagtatatgacccgccgtcctgctatccttcgcttcccccgccccatgtggctgcggggccgcggcggcgctgcccactatggcccggaaagtagttagcaggaagcggaaagcgcccgcctcgccgggagctgggagcgacgctcagggcccgcaggtgagggttgagaggccggcacctgggtggtgaggctgaggaaccaagatgggcttagggtccgcagatcctgcgacgggaatcggggtccagggtctgcagtcagaggcaaaacaggaatgggttcagggcctatagggtcaggactggaccctcgttaactggagggcagataggccagggcggtgaggagccaaaggggaactcaggaatgggacataatccgcgggaggcctgcattcgtggatagggcttgaaaagaaaccagaatcttggctttggaggaaggggaaaccgaagttaagggaatcggaaacaaactctggtagagtgaactctaccttccatgggccctaggaagctgggatgattgcgtccctcctggaagaaggaagtagtctccctatatgtatacccaaccctgagctgggcctttcggcgtttggaccccaaaagaaacaacagttcccaggtatcatctctatgccgccccctttggaggggaaggccttcttggacatagatatggcctctgatttcccgggggcctactaccccgttggcggttgatttttcgaattctgcaactgcctggagcgcgggcatgatgacagaggaacggtcattgatgatgcatccctggaagacctgggagccaggtctggctccttggactgtatcttccgtgctccagtgggagtacagactgagagggagaagggggctgggtagagatgcagcccatgtcggtatgggaatcactctacctctcatttccttcaatctttcactcctaaaatgtctagtaaaccttttagtctgttctattctgcattcattcccttgactttcagcccttgtaattcacattggtaagtttgactgtgagcaacatctttttaatgttggaagagttaaacgactttctggattgagattcttgttctcttgtgtttgtatttgtgttgtttgtaaattctgcagtatgagttatgagttggtgatttctgtaatacagtaggatctgttctgaagaagagtagccaaagccctgatttctaatgttgtttccacagtttggctgggatcactcgcttcacaaaaggaaaagacttcctcctgtgaagagatccttagtatactacttgaagaaccgggaagtcaggctacagaatgaaaccagctactctcgagtgttgcatggttatgcagcacagcaacttcccagtctcctgaaggagagagagtttcaccttgggacccttaataaagtgtttgcatctcagtggttgaatcataggcaagtggtgtgtggcacaaaatgcaacacggtaagtgcctggggggatgtgacctctctcctaggtcgtggatatattgctccacttgctctagaacctctgctagttttcccgtctgtttcttttaggagggacttgccttactctcctttccattctttcccgttggtgacttcttcctcttttcgtgttccttttttcactcatacatttcttttctgataagtcctcaaaggagtgtatttcttcaggccctctctggatgtgctgcttctagagggttgtttgtttgtttgtttgtttttgcctcatatttttatgctggtttttaagtcataggcctcaaaggaaagatttaagaaataatgatgcttagagcatcattcaggatacataatagtgaaaacagcctaagaacgtatgtcgaagtatttaaaatagcacacttggctgttttttagtgaacagaatctaaaaatgtataaactgaaatatgagaaatacatgaactgtttcctataaggaaggcagggaatgtgtgtctggtagtatatttcagggtataagcattagctctttggaaagtagcctttttaagagtgaatagaaagacagttataaatgaatgaagtgaaaaatttctcagtaagctttgtaaccaacccaattataggccaggataaaataagtcaaagagcagaaacgtttggaatagagtccacgaatagcatgatgtcacaagactggcaaatgaaaagaggcagggcctagggcctaggggtgggaaatgattacgcccagccctccctcggttttcacctcccctgtgtgaatggacaagtaatgtcataatgtgtgagtaaattgaccctggaatgaaacacattttggatcattaaaagagagaagattgctctagatcaagaaagtcttaagtactaggagaagtgtctgtttataaaggacataggcaaaaatttaaacagttttaaggaaggaaataataccatggtggttggtctgtttataaaggacataggcaaaaatttaaacagttttgaggaaggaaataataccatggtggttggggccaacctttcgtttcctcttctgttgaggagtcgcttgtcttacccagaagcctttcaaaactaagtggtggcaacgggcctccacagaacttccttttcttggtctctccagctgcccactcgtggttaagaactgtcatccttgtcacttggagtagaaaaagagtctcctgcttggaagagttcattccactccccgcacgtgcatcatagtgtttagcctagcaaatattactgaattgtaaactgaattaatcatcatagcctcttgcttgttgaatttattgacactattttgaaggcgagcataataagtaataatttaacctactcttaattcctacctctttctgtcttcctaatcctcataacctagtgtttggggcaaggggagctgttttcattttatagttagtatttgtttgtttttgcttagcttccagaaccaaagcagggaactaggaatagtgctcttctctgaactttgtgacattgggcaaatgattcccttatttgtgcttttgtttttgcatctgcaaaatgggagtgataatatctggtgctaaggtgtctgcatgcatctgggaaatattctgagtgagcaatatcttacttatttaaaagtactagtagcggtaaaaatgatttccataaccttttcccacaatttgaagagaggaaaattatttaaaaattggaattgtctttggataatgtgtgaagatttcagaggtgggagagattatgttgtattctcaataggaaagttttgatgtagaatgtccctgtgctgtgggctaacaatcaaactagggtagtcattcaatccccagatttcttggccccagctagcacagcagtaacagcaaggatagccactgttgtttttatcattaataacaataaagtcatatttttactcaactgcttaagtagaggtggtataaccttaattagaacatggatctggcagctgggatgggttaggtatatgttcatggtttagacttacgcaaattcagattggctgcggagccagacagaaaagctaagtgaagaaaagtttgctaggcgcaagacagtaaggagtagtaggggctgcaaagaactacagaaggcattcttgactttaaccaactgttgccgtgtaggaatttgagcctagtgttaaaaagattttctttcgcagggcaaggtggctcacacctgtaatcccagcactttggaaggccaaggcgggcggatcacctgaggtcaggagttcgagaccagcctggccaacatggtgaaaccctgtttctacagaagtacaaacaaattagctgggcatgatggtgggtgcctgtaatcccagctactcggaaggctgaggcaggagaattgcttgaacccgggaggcggaggttgtagtgagctgagattgtgccattctactccagcctgggcaacagagtgagactccgtctcaaaaaaaaaaaaaaaaaaaaattgatactaatgtcttgaacctatataactggaaagatggcagggtgaatgttaaggaacagatttgggttttgtccttttcatcaattagttgaagcttggcagagagtaaggattgaagttaatgatttggcagtcatttatgtagaaggaattattgaaattgttacattatcatgggaaagacagtagagagcaggcattcctggcttgagttgtgtaaactttccctaaaattgcaaagttttgattatatgtgtactttctgggcaagattttgggggggtggtgtgggaagtcgttcttagtttttgtccttagattttgaaagagagtactatgagccaaaaatggttaagaaccactgatactgacagataagctaaggagagaaccttggaaaacatgtacatttacagggcaagaagaactgctgcgggggagcagggaactcaggaaaaccgggagaatacagaaaagaattcaagaaaggaggactttatttttgtttgtttgcttttttggtttttttgagacagagtctcgctatgtcaccaggctggagtgcagtggcgcgatctcagctcactgcaacctctgcctcctgggttcaatcgattctcccgcctcagcctcctgagtagctgggattacaggtacctgccaccacacccagctaatttttgtatttttagtagagatagggtttcaccgtgttggccaggatggtctcgatcttctgacctcgtgatccgcctgccttggcctcccaaagtgctgggattacaggcatgagccaccgcgcctggccgaaaagagggctcttgaaggggctgggggtggggtgtgatttgaggagaaggatggcaatcggcagagtgatgatctacacagttggaggtatttaattttggacgtgaactcttatttcccattgtcagcactctccagtcaaagactaccagggactgttcttgtagcagaacaagtcagatatagttgcttgttgtacctaggagaaccttcaccataagagagcgagggacctctcggtaagagtgctggaaaggagttacaacactgggacttgttgcacgtgatttgggggacggcttaaggatatagcactttgctccagatggatactgtcacgacgggcaaattctatgtttgggtatcttaatcttatctagcaggaggttaaagctgtaattgataaagatgaaacagtcatttatattagccaggttaaggggatgtttgatctttttgtggtttagtcagtgttcttgggtttttttgtttgtttgtttgttttttgagatggagtctcgctctgttgctcaggctggagtacagtggcatgatcttggctcactgcaacctccgtctcccaggttcaagtgattctctcacctctgcctcccgagtggctgggagtacgggcacatgccaccacgcacagctaattttcgtatttttagtagagacagggtttcaccatgttggccaggctggtctcgaactcctgacctcaggtgatccacctgcctcagcctcccaaagtgctgagattacaggtgtgagccaccttgcctggccagtgttcctgttttggtctgtgttcaggtatgattatagagtggtcttgtttttgtctttatcacagttgcagagtggccttgtctgatgttgatattctctgaaattatttatttacgctaggacaccaaggcctacctgagagtatcaggctaacccattatgtcagggttgctttgttttcttttttttttttttttttgagaccgcgtcttgctgtgttgccaaggctggagtgcagtggcacgatcttggctcactgtaacctttgcctccgggttcaagcgattcttgtgcctcagccccccgactagctgggactacaggcgcgtgctaccatgcctggccaatttttgtatttttagtagagacggggtttcaccatgctggccaggctggtctcaaacgcctgacctcatgtaatctgcccgcctcagcctcccaaagtgctgggattacaaacgtgagccaccatgcccagccactttgttgtttttcaagacagcattttgcactcagggtggagtacagtggtgcagtcatggctcactgcagcttcaaattcctgggcccaagggatcctcctgccccagaatcctgagtagctgggactatatcacatgccatcatacctggcctttttttttttttttttttttttttttttgagacggactttcattcttgttgcccaggctgaagtgcagtggctcagtttcagctcactgcaacctccgcctcccaggttgaagtgattctcctgcctcagcctcttgagtagctgggattataggcgcccaccaccaagcccggctaatttttttgttttttagtagagacagggttcaccatgttggccagtattggctgggtatagtggctcatgactgtaatccagcactttgggaagctgagacaggaagatcacttgagcccagagattcaagaccagaccagcctgggcaatgtagtgagaccccatctctacaaaatatttaagaattagctgggcatggtggcttgtgcctttggtcctagctactcaggaggctgaagtgggaggatggcttgagtctgggaagtggaggctgcagttaaatgggattacaccactgcactctagcctgggtgacagagcacgaccctgtctcaaaaaaaaaaaaaaaaaccgcaaaagtacatagtatttgttgaaagaagagcctaaaaatgttatacccttttgcctaaaatgttcacacctgagaatttatccaaaggaaaagtcgtttttaacaagataataattggaagctacttaatctaaatactaacaatcgaatacttaagtaaatagtgataaatctggatggtattatgcagacattaacataattatggagactgtaatgtgcgaagaattcagtacgtttaatgaaatgagatacaaaatcctgtctctgctgataatagctgtgcacaattaaaatatatatgtggttgaagactaaacaggaacctgacaaatgaaaaacagattttaaaagagagaaaattctgagtgatctttcttgcattttaaatttctgtattgttgataaagtatcgtttgtacaataaacactcatcttttaaaactgttatttcagctagatgaaccttgcgttttcttatcctaaaatgacggtgagaaggaccgaagtaggggctcaaaaatacagtagtagaatatgcaacaaaaggagttgctcctcttagtcacacagtgagttttttggagctcaaaatagcccctggtgagggctcttgattctcaatgggcaaatacacaaccatatggtcctggtcctcaagtcttaatgctgttatacttaggaagtaagtgtgagataagagagatattattattattattattttcttttttgagacagggtcttactctgttgcccaggctgcagtgcactggcgcaatcttggctcactgcaatctccgcctcccaggttcaagcgattcttctgcttcagcaccaccaagtagctgggattacaggtgtgtgccaccacgcccggctaatttttgtatttttagtagagatggggtcttgccatattggccagcctggttttgaactcctgacctcaggtgatctgcccacctctgcctcccaaagagctgggattatatgcatgacccaccacgcccggccatattatcattatttaacactattgttaagagtttataatctcttataccagatacgtaattaccgtctctgctctccagtagtttgcaagttagggataaagctccctgttaattctgagtagaaggccttatacctggaaatgtcaccagggaacaaaaacctgaaagtttcctgtgtacagattttctcctgaataacttacacgttaactgttagcatccttgagtatatagaaatcaatttcaggccgggggcagtggctcactccggtaatcccggcactttgggaggctgaggcaggtggatcacttgaggccaggagttcgagaccagcccggccaacatgatgaaatcccgtctctactaaaaacacaaaaattagccgggcatgatgccgcatgcctgtggtcccggctactcgggagtctgagtcaggacagtcgcttgaacccgggaggcagaggttgtagtgaactgagattgtgccactgcactccagcctgggcgacagagtgagtctgtctttttttccatcttggaaaaaaaacaaaagaaataaatcaatttccatcttctataggtaggaagaaataaagattcttatgaaatcagactattggactaatccttttatttcccctttcatttttcagattggtatcacttggaaataggtgatgggatttgtaaacatataaaagcaatactaaatagggttctgatttaacagtccaagaataatttctttttttgtttgtttttttgagacagagtttcgctcttgttgcccaggctggagtgtgatggcgcgatctcggctcactgcaacctccgcctcctgggttcaagcagttctcctgcctcagcctcccgagtagctggaattacaggcatgcgccaccacacccagctaattttgtatttttagtggagatggggtttctccatgttggtgaggctggtctcgaaatcccaacctcaggtgatcctcccgcctgggcctcccaaagtgctgggattacaggtgtgagccactgcacccagcaagaatttctttttaacaaatatttgtttagatagatgcttaaggtagctaaacctctgttgtatgttgtcaaagtttatgtggtgactttggtgggtactaggtaaaatcaaggtgtcttgccaaagctggcttttaggattcagtccatttttaacagagacctccaaaatcaaggattagaggccgggcgcggtggctcacacctgtaatgccagcactttggccggccgaggcaggcagatcacgaggtgaggagatcaagaccatcctggctaacacggtgaaaccctgtctctactaaaaatacaaaaaattagccgggcgtggtggtgggcaccttttttttttgagctccatctcaaaaaaaaaaaaaatcaaggattagaaatcaatttactgctagatataaagcttataagaatatgtcacttaaatccaaaataattgtaaatcctaatgtggccctccttccacgaagtcatgattctgtggcgaaacatcagaattcaagacctattatgaagtaccattacttatcttagctagctagtagtgtagtccatcttgtgtaggaacagtttagattcacagctcagagtgtctaagatcttggcatagcgcagacacgtggactgattgatgattgatttttgagacggagtctcgcgctattgcccaggctggagtgtaggggcacgatctcggcttactgcaacctccgcctcttgggttcaagcgattcttctgcctcatcctcccgagtagctgggattacacacccgtcactgtgcccggctaatttatgtatttttagtagagatggcgtttcgccatgttggccaggatggtctcaaacttctgacctagagtgatctgcccccctcagcctcccaagtgctaggattacaggcgtgagccaccgtgcccggccggatttatttattaatttattattattatttgaggcagaaccttgccctgttgcccaggctgagtggtgccatcttggctcactacaacctccgccacctgagttcaggcgattctcctgcttcagcctcccaagtagctgggactacaggtacgcactactatgcccggctaatttttgtatttttaatggagacagggtttcattcactttgttggccaggctgatcttgaactcctgacctcaagtgatctgcctgccttgaccgcccaaagtgctgggattacaggtgtgagccactgtgcccagccagatttatttatttatttgtattatttatttatttatttttgagacggactctctctgtcgcccaggctggagttcagtggcgcgatctctgcagcctgcccctcctgggttcaagcgattctcctacctcagcctcccgagtaactgggattaaaggcgactgccaccatgcccggctaatttttatatttttagtagagacagggtttgccatgtttgccaggctggtcttgaactcctgacctcagttgatctgcccacctcccaaagtgctaggattacaggcgtgagccaccgcacccagccctggatttatttatttaattttgttcctccttattccccagtactaagaggaggccctggatttcaataaaagaatgttcattgccatgttttgtattactaaaaatttggacgtggcataaatgttcaataatagggaattaattcaattaatgtcagtatattcatgcagtgaactaccttatcgccgttaaaggtatgtagtggcaaggcttgatggcttatgtctgtaatcccgcactttgggagactaaggcgggaggattgcctgagcccaggtgggttttattacaacatgggcaacaaagtggcaccctgtctctataattaaaaaagatgtacagtagttcaaactgttcacccatcactagttcctcagtgtaagttcctaaaattggtattacaagctatatatatatgtctatggggagactgcagagactatagggtcctgctatgtgtatatatatacttttttttttttgagacgaagtcttgctctgtcgccaggctggagtgcggtggcgctatctcggctcactgcaacctccgcctaccgggttcaagtaattctcctgcctcagcctcccaagtagctgggactacaggtgcaggccaccatgcccagccgcccggctaattttttgtatttttagtagagacggggtttcaccatgttagccaggatggtctcgatctcctgacctcgtgatccgcccgcctcggcctcccaaagtgctgggattacaggtgtgagccaccgcgcctagccgctatacatatttttaatgtttgatacatattgtctgtccattttctgttgtgtttcttggtcttggctctctcctttgctcctccccactttctcagattgggatagtgaatagattcttctgctttgatttcacttgtctttcctttcccaacctctccacagacttaggttgcccacctgtcttttactgactgcaacatagtgtgtcttgttgtctgtgtgacctgcgtagaattactttcctttctcattgggctccagtctgaaacacccttgaattttagaaacattgtaaggttaccccttcctcttttttttgtttttgtgttttttgtttttagaggcaaggtcttgctctgtcacccaggctggagggtaatggcacaattatagctcactgaagccttgacctcctgggcccatgagatcctcatgcttcagcctcccaaatagctgggacgataggttcctgctaccacatctgactccttttttttaagccatctttgtctttgtgtacactcatttacatttgtctagatacacatgaatgcatgcagagatagactcactagtcttacatgtctctttccccccatcctagaatgtaaactgcagggagcccgagcctcgagcttaccttgccgcgctgctagtttctggcagggatcccagtaggttaatgtggagcagcctcattctgggaaatgttagtggagctgcatgaatccttggacccttgtcagagagcttgggaagagattctgtggcagctcatccacatcctgtttcttcccatgaagaagcagggtggctctatccttcaagtggttcattgtcattcctttgcaataatgagggtgaggttgggggcacactcttagtttagctaatttttggatttttagtagagacaaggtttcaccatattggccaggctggtctcaaactcctgacctcaggtgatccaccagcctcagactcccaaagtactgggattacaggtgtgagccaccgcatccagccaagatcaactttttaaggttccacatataagtgaggtcattcagtattctatacttggcttgtttcacttaacataatgtcctctaggttcatccatgttgtccaaaggatttcattcttttttatagctaaacagtattgcattgtgtatctgtgccacatttttttttttgagacggagtatttgccctgtcgcccaggctggagtgcagtggcatgatctcggctcactgcaagctccgcctcccaggttcacgccattctcctgcctcagcctcctgagtagctgggactacaggtacccaccaccacgcccggctaattttttgtatttttagtagagacggggtttcactgtgttagccaggatggtctcgatctcctaacctcatgatccgcctgccttggcctcccaaagtgctgggattacaggcatgagccactgcgcctggcctgtgccacattttctttatgcatttattcactgatgcacacttcggctgattccgtatcttggctattgtgaataatgctgcagtaaacatgcaaattcagaaatgcctaatggaagagttttagggtaaggcctgggaattgtttttgttttgtagtgttttgtattgttttttaaagaaaattcagccttggtgcggtggctcatgcttgtaatcccagcactttgggaggctgagatgagcggatcacttgaggtcaggagtttgagaccagtctggctaatatggtgaaaccctgtctctactaaaaattcaaaaattagctgggcacagtggtgtgcacctgccatcccagcgacttgggaggctgaggcacgagaatcacttgaacccgggagccaagatcacgccactgcattccagcttgggtgacagagctagactctgtttcagaaaaaaataagaaaaaattcaggccgcgtacagtggcccatgcctgtaatcccagcacttcggaggccaaagcaggnnnnnnnnnnnnnnnnnnnnnnnnnnnnnnnnnnnnnnnnnnnnnnnnnnnnnnnnnnnnnnnnnnnnnnnnnnnnnnnnnnnnnnnnnnnnnnnnnnnnnnnnnnnnnnnnnnnnnnnnnnnnnnnnnnnnnnnnnnnnnnnnnnnnnnnnnnnnnnnnnnnnnnnnnnnnnnnnnnnnnnnnnnnnnnnnnnnnnnnnnnnnnnnnnnnnnnnnnnnnnnnnnnnnnnnnnnnnnnnnnnnnnnnnnnnnnnnnnnnnnnnnnnnnnnnnnnnnnnnnnnnnnnnnnnnnnnnnnnnnnnnnnnnnnnnnnnnnnnnnnnnnnnnnnnnnnnnnnnnnnnnnnnnnnnnnnnnnnnnnnnnnnnnnnnnnnnnnnnnnnnnnnnnnnnnnnnnnnnnnnnnnnnnnnnnnnnnnnnnnnnnnnnnnnnnnnnnnnnnnnnnnnnnnnnnnnnnnnnnnnnnnnnnnnnnnnnnnnnnnnnnnntgtctcacacaacacaaatatgtgagtgggcaattaattttgtttcaggaaataatttgaggattatctggttagggatcatttgtttattattagtttattttttgagacagagtttcgctcttattgcccaggttggagtgcaatggcgtgatctcagcttacctcaacctctgcctcccgggttcaagcgattcacctgcctcagcctcccgagtagctaggattacaggcatgtgccaccacacccggctaattttgtatttttagtagagacaagctttctccatgttggtcaggctggtctcgaactcccaacctcagatgatccgccctcctcggcctcccaaagtactgggattacaggtgtgagccaccacacccagccaatattttttattttttgtttttgagatggattctcactctgtcgcccaggctggagtgcagtggtgtgatctcggctcattgcaacctccacctcctgggtccaagcaattctcctgcctcagcctcccgagtagccaggattacagactcacgccaccacacctggctgatttttgtatttttagtagagatggtttcgtcatgttggccaggctggtcttgaagtcctgaccccaggtgatccgcctgccttggcctcccaaagtactgggattacaggcgtgaaccaccacgctcagcctgggatcatttgtttaaaaggataagaaacccactcacatttattggaaagacgagttcacaaaccccaagaacagaaagtattattggatctcagagagaagtggaaacaggaattgaaaagccactaggaaccaaggatgtccatgtttcctgtcttttttttttttttgagttggagtctcacactgtcacccaggctggagtgcaatggcacgatcttggctcactgcaacctccacctcctgagtttaagcaattctcctgtctcagcctcccgagtagctgggattacaggcgcccgccaccacatccagctaatttttttttttttgtatttttagtagagatggggtttcaccatgtttgccaggctagtcttgaactcctgacttgaagtgatccacccgcctcagcctccctaagtgctgggattacaggcataagccactgcgcctggcccatgcttcaagtctcaagttttcttttctccaaggactggctttggtaaaaagtggccacccgggcggtttggtctagtgccaccagccagttacatattccctaaagaatctgaatggcctagtccaatctagcctttggactgattgtcctgaaactccctctagactgtgctgtgatcagggggtctaggcttatagcaaataaaacagctacagagcctcaccctcacagggatgtgggggcctactacagtagttgggcaggccctctgaaaggtgactgttgtaaatgcttaagtagttgctggggcaagattgtagaatcaaataagataaattctctgcacttagaattgggagagagttaatagctttatgaggaagacaaataagtaaatattttaaatcagtgcgatatggtctaagtgttgtgggtagagggatatcttgggagcctacaagagaggcacttgatcagcctggacatttagagagtagtccaagaggacatatctgaaccgaatcatgaaagataagtacatgttggccaggtaaaagagtaggagaggctgggtgcggtggctcacgcctgtaatgccggcactttgggaggctgaggcaggtggatcacaaggtcaggagttccagaccagcctggccaatatggtgaaaccccatctttagtaaaaatataaaaattagctgggcgtggtggtgcacgcctgtagtcccagctgctcggagggctgaagcaggagaattgcttgaacccaggaggcagaggttgcagtgagctgagatcatgccactgcactccagcctgggcgacagagcaagacttggtctcaaaaaaaaaaaaaaaaaacagaaaagaataggagaatcatttctggcattgtgaacagcatgagcatgaaacaaaataattatatttcattgaagaatttttcatgtatgatatttataagcaattatttctagagtttgaagtccatggcaagaggtgatgatagtagaggctggactgaggagactcttggttttgttttgttttgttttgttttgttgaggcagggtcttgctctgtcacccaggtgcgagtgcagtggcaccatcatggctcactgcagccttgacctcctgggctcaagtagagacagggtctcactgtgctgcctgagctgttcataaattcctgggctgaagtaatacttctttctcggccttccaaagtctggccccgaggagagtcttaatgccatgctaagtatctcagatttaggtgacggggagtcattggatgttttttagttggggactggcatgggaagatttccatttttaggaagttgactctgcttataatagaataattttgatagcggtgttgcctgaaggcacaaagactaattgtggttgtccaaggagaagtgatgagtgaggaagcagaggaaggagtcagctgtaagaatatttaggaggtaggttaggcaggactaggatgatggaaatgagggaaaaggagtaatttaggataaaatccacacttgagtgacagggtagatagtggtggtgttaggaaagtgagcaatttgaggagcaaggttatttgttttgggcatattcagtttcagatgcttgtgggatgcatcagcaatgatgccagttaggcagggagtctgctgctctcaggtagttgccagtttgagagtggtttgtccccttcttccccctgctcccactcagtctctgacactcttctagctactcctttctctctctctgtctttaataaacatatattatatatatttaaatatataaagtacatattatatatacatatataattatatataatttaaatatttatatatgtatccagtgtaatgcccccacccaaggtgttggacatggtggtagagccctacaatgtcaccctctccgtccaccagctcacagaaaacacagacgagaccttttgcattgataaggaagctctctaagacatctgcttccgacccctaaagctgcccacacccacctatggtgtcctgagccacctggtgtctgcactgtgagtggggtcaccacctgcctgagcttccagggccagctcaatggccatgaacagggtcctattcccccgcttgcacttcttcatgtctggactcatccagaccatacaggacaaccagcagtactgagccccgatggtgcccaagcccatccagcggatgtttgatgccaagaatatgatggctgcgtgggacccccctctgtggctgttgcttagcagctgccatgttcaggggccgtacgtgcacggaggaggtggataagtaaatgcttaatctccaaaacaaggacagcagctactttgttcattgaatcccccacaaggtgaaaacagctgtctgtaacatcccaccctgggggctaaagatggctgccaccgtcattggcaacaacacagccatctaggagctgttcaggtgcatctcgtacagttcacagccattttctggcacaaagccttccagcactagtacatgggaagtggcatggatgagatggagttcactgaggctgtgagcagcatgaacatgtccgagtacaggataccacagccaaggaggagagagagtttgaggagtgggcctatgaggaggtggcctagagccttctgtttttgggtaaagggaagaagtgatgtgaactttttattcacccatagtctgttctgtgatagccatgtctgtgtgtgcacttgttcttcatgtcttgacatcacagctctaaagacactccaatgaaaccattttcctagtgaaaaaaaaaaaaaccatatatatatatatataaaaacatatacataaaatacatatatgtatttgtttgagatagggtcttgctgttttgcccaggctggactcaatttgtgatccttatgcctcagcctcctgagtagctaagtagttgggactacaggcacttgccaccttgtccacctcattcatatatatatatatatatttatttattttttttttttgagaccaagtctcacagtctcacactgttgcccaggctggagtgcagtggctcgatcccggctcactgcaacctccgcctcctcggttcaagcgattcttctgcctcagcctcccgagtagctgagattacaggcgtgtgccaccatgcccagctaattttgtaagtttagtagggttttcaccatgttagccaggctgatctcgaactctcaagctctggtgatccgcccgccttggcctcctaaagtgctggcattacaggcgtgagccactgcgctcggccctttttatattttaaacttaagactcacctagtttctcctttcatatatcttctgtgtaagcagcaggtttatttatgtaaaggtttgacatgtttgacttcaacatgagaattgctgacaggattttatttcagcctcttaggctataaggtgtatctattagggcagatattatttctctcgttcatagctgtgttcataacacttagaacagtactggaaaataagtgagtgtccgaaggaatgaactgttgaatcactgaagagtttgactcttctaagggctgtcctttcgctaagactgatttttccataaagcatttctctaagttgaatcttggagggtaaagaggtggaagagagcctttcaggcagaggtagcagcaagagcaaaggcagggaggaataggactgaatgggatgtgtgtgtatagagaacagccatgagatactaataattcttccttgtcgtatgtctctggtcattccagaaaacttagtaatattaatagttatattagtagccatgatgtgttctgggaattgtgtttcgtttaaaagtttctgtgcatggtgtggttaggtgaggattcagtgtataaaatatgaccaaactgacagaaaactgtgttggtcttcctctttgtgtccgtggcctaatagaaggcctcttggaaaccttctctgaatcccaggcagaacttactgcttcctaatctgtgttcatgtagcatattattgctatctctaatattgtgttatattgacttatttcatgtttcatgtcattagtagtcctgaccatgcctttaataattcctagggtctaacatgtagtagttgttaattaaatgttgatgaacagttgaacaaaaggatgtttataccctgtattggccacgttaaatttatgttcagcttctgtatccattttttcttgtagctatttgtcgtagatgtccagacaagccagatcaccaagatccccattctgaaagaccgggagcctggaggtgtgacccagcagggctgtggtatccatgccatcgagctgaatccttctagaacactgctagccactggaggagacaaccccaacagtcttgccatctatcgactacctacgctggatcctgtgtgtgtaggagatgtaagttttcccagtagttgtagttggagggagccttgtttttaaacgggtctcagtgattaacatggaccctcctctcatcagcccagagtggggactggactccccatagggcacagtgtatatttgataaaggggcaagcagcacacctcaggggccaacagtattgggttgctgtttgaatccatagtgtccacatacttcccactgcccatagtcagagagtagcagtttactaaatcatccattcattcatcaggcatttattgagtcttctatggctaggcgttgtttgagacatagcagtgaacagaacagataaagcccctgtcctcttgaagcctacattctagtggagggtgacatatagacaaaacataaaccatataaactaatatttaccagtaatacatcagagtgtgataagtgccatggagaagaataaaggcagcataaagggactgagagtaaggtggaggatgctgtatcagaagataaagtttcattgataggatgacgcttgagcagggagacttaaaggaaatgagggtacaagccatgtagatgtctagatgtctggaggaagagagttccagatggaagatgggacccagaggtagaaggcaagagctatgtgtccactacccacagtagtgccaatttcattccagctttgagctcctcaagatagaaggtaaagattgatcattctctgtgggttgagaccaccagagatcagagttgtaatttctacaaaaatattttcagtctgacttgtatgcttctttagagagtttattacaatccttattttactaatttcttattttcctccctgtacctgttactccctgctctccaaggatggacacaaggactggatcttttccatcgcatggatcagcgacactatggcagtgtctggtaaagttgcccttttatagggagcttttgatgtggcagggattgggggctagagattgaaaagggatagtagtgtgataggaaacagcccagccgggctcagtgactcacgcctataatcccagcactttgggaggctgaggtgggtggatcacttgagcccaagaatttaaattagttgagtgtggtactgcatacttgttgtcccagatactcagaaggttgaggcaggaggattgcttgagcccaggagaaccaggctgcatcaagctgtgatcgtgccactgcactccagcctacatgacagagggtgaccctgtagaataataatttcttatttagtgtaaaagtgatacacatttattgtaagaaaattttaaaatataggccgggtgtggtggctcacacctgtaatcccagcactttgggaggccgaggtgggtggattatgaggtcaggagttcgagaccaggctggccagcatggtgaaaccctgtctctactaaaagtacaaaaaattagctgagtgtggtcgtgggcgcttgtagtcccagctgctcaggagactgaggcaggagaattgcttgaacccggcaggcagaggttgcagtgagctgagatcgcgccactgcactccagcctgagcaagtgtgagactccatctcaaaaaaaaaaaaaggatggatagatagataagatagatagataaaaaaggaagtaaggaccacccacaagatctctatccagagataaccacttttttttgtgggttgtttcgttttctttttgagacagtgtctcattttgtcacccaggcttgagtgcagtggcatgatcctagctcactgcatccttgagctcttgggctcaagtgatccttctgcctcaggctcccaggtagctgggactataggcacacaccttcacacccagctagtaataacgactgttgacattttaaaatataacttgctagtctttttttagtaccttttttcttttcctttagacacagggtcttgctctgtcacccaggctggagtgcagtggcaccatcatggctcactgcagccttgaactcctgggctcaagctatcctcctgcctcagcctcccaaagtgtttagattatacaggcatgagccactgcacccagccttagtatgatttttttttttttttgagacagagtctcactctgtcttccaggctggagtgcagtagcacgacctcggctcaccacaacctccgcttcccaggttcgagcgattcccctgcttcagcctcctgagtagctgggattacaggtgcccaccaccacgccaggctaatttttctatttttggtagagatggggtttcaccatattggccaggctggtctcaaactcctgacctcagtgattcgcctgcctcggcctcccaaaattggcccatattttttagttggttaatatgagatcatttagaagatgcatatatagaattctttgtgaaattctttcttttttttttttggagacggagtcttgctgtgttgcccaggctaaagtgcaatggtgcaatcttggctcactgcaacctccgcctcctgggttcaagcacttctccctgcctcagcctcctgagtagctgggattacaggtgcccaccaccacgcctggctaatttttgtattttttagtagagatggggttttgccatgttggccaggctggtcttgaatgcaggacctcagttgatccacctgcctcggcctcctaaaatgctgggattacaggcatgagccactgcacctggcctcatttttttacactttaaaattttcataataaaactttgatggggtaaatgaggtcacactgtacacaaagtaatcttctgaaacacagttatctaattttctcactctgatgctcaaatctttgagagactttctagtatctgtaagatgagaaacaaattttatagcacagcatacaaggcccacacctatctttccaactttctctctcatagcttccatgcttgcaccccataatccagcattaacaaaccatgtctagttctccagatgtgcccttgtctctgtggccttttctaatttcacataattaacattctactttgaattgatgtgtctgtcattttagatgtttttttctttttttttaatttttgagacagagtctcgctctgtcgcccaggctggagtgcatcttggctcactgcaacctcagcctcccaggttcaaacacttctcttgcctcggcctcccaagtagctgggactacaggtgcgtgccactgtgcctaatttttgtatttttggtagagacagggtttcaccatgttggccaggctggtctcaaactcctgacttcaagtgatctgcctgcatcggcctcccaaagtgctggaatttcaggcgtgagccactgcgcctggcctagatgtttttttctatgaagtgttcaggagattagcagtgtgggaagggcaccttcttggtctcaaaggagaactggcaaataagtttactggaaaaagaattttaaaacacattttcgttgttgttgttactgttgttgttgttgagacagggtctcactctgttatgtaggctggagtgcagcgtgtgattattgctcactgcaacctcgaactcccaggattaagagatcccctcaagtagctgggactacaggcacacaccaccacacccggttaattatttctattttttatagagactgggtctcgctttgttgcccaggctgctgtcaaactcctaggctcaagcgatcctcccacttgagcctctcgaagtgctgggattacaggcatgagccactatgcccggcctaaaacataatttcttgatactctgttttatggatataatataaccctattgttgaacatactgagtgttccgaataaacatctttgtgtatgggtattgtgatagtggattgtttctgaatgggaatataaacttactttttatttttgtttcttttttttttttgagatggagtcctcctctgtcgcccagctggagtgcagtggccatgtcttagctcactgcaacctccgcctcccaggttcaagcgattctcctgcctcagccttctgagtagctgggactacaggcgcgtgccaccacgccgggctggtttgtctttttagtagagatggcttacaacatgttggccaggttggtcttgaactcctgacctcgtgatccacctgcctcggcctcctaaagtgccgggattacaggcatgagccactgcgcccagctgttgtttctcttttttttttttttttttttttttggagttaaggtctcgccctgtcacccaggatggaatgcagtggcgtgatgtgatcatggctcactgcagccttgacctcccagtctcaaacaatcctcctgtctcagcaccccacccctgtccctgagtagctgggactacaggcatgtgccaccatgcctggctagttttttgtatttttttgtactgatggtgtttcaacattttgcccaggctggtctcaacgtcctggcctcaagcgacctgcctgcctaagcctcccaaagtgttgcgattacagtcgtgagccactgcgcccagccaggaatataacatttccttgctgcaggttgctcagttgtcctctagaaagataccattttagcttgccaccaacagtatattcagggctcaattcacagaaaagtgttcttgttttttgttgttgtttgtttgtgtgtttgttttgagatggagtctctgtcatccaggctggagtgcagtggtgtgatctcggctcactgcaacctccgtctcctgggttcaagcaattctcctgcctcagcctcctaagtatctgggattacaggcacacgccctactaatttttgtatttttagtagagacagggtttcaccatgttggtcaggtcggtctcaaactcctgacctcgttatctgcctgcctcagcctcccaaagttctggggttacaggcgtgagccaccgtgcccggcctgggtttttaagtgctttattattgtttgctaagaaaactgatttatctttttaagcattcattttatataaaacagtcattattctttttttttttggaggcagggtcttactctgttgcccagactgttggtgtgatcccagctcactgcacccttgacctctccaggctccagtgaccctcccacctcagcctcccgggtagctggtaccacaggtttgcgccaccatgcctggctaattttgtattttttgtagagacagggttttgccatgttacccggtctcccagagtgctgggattaaaggcatataccactgtacccagcctagaatagtcgtcattattatcttttttttttttttgcgacagggtctcactctgtcacccaggttggagtctgtggcacaatttcagctcactgcaacttctacttcccaggctcaagctatcctcccagctcagcctcctgagtagctgggaccacaggcgtgccccaccacgcctggctaattttttgtatttttggtagagatggggtttcgccatgttgctcaggctggtctcaaactcttgagctcaggcggtccacctacctcagcctcccaagttgctgggattacaggtgtgagcagtaattcttaataaagaacggtctagaacagtcattcttaatagaaggattgtgggccgggcacannnnnnnnnnnnnnnnnnnntcccaaagtgccggcattacaggcgtgagccaccgcacccagcctctcctactcttttacctggccaacatgtacttatctttcatgattcggttcagatatgtcctcttggactactctctaaatgtccaggctgatcaagtgcctctcttgtaggctcccaagatatccctctacccacaacacttagaccatatcgcactgatttaaaatatttacttatttgtcttcctcataaagctaccgtctctactaaaaatacaaaattagccgggcatggtggcacatgcctgtaatcccagctactcggaaggctgaggtaggagaatcacttgaacccagtaagcagaggttgcggtgagccaagatcgtgccattgcattctagcctgggcaataagagtgaaactctgtcccaccaccaaaataaataaataaataataaaggaattatggccgggcacagtggcttacacttgtagtcccagtatttcgagagactgaagcaggagtttgaggtcaggagtccaagaccagcctgggtaacatagtgagaccccatttctacaaaaaaatgaaaataaaaaattacctgggcatgaggatacatgcctgtagacccagctacttgggaggctggggcaggagaattgctgaagcccaggaggttgaggctacaatgagccataatcatgttattgcactccagcttgggtgacagagccagaacctgtctcatttaaaaaaaaaaaaaaaaaaaaagttggggagggtttgtggtccctgtgggttcatggaaagcccatggatttcaggaaatccatgggtctccctgaaattgaatgtaaaatgtggtgttttgtgtaattttctagaaaaagaggcctagtctgggtatggtggctcatgcctttaatcctagcactttgagaggctgaggtatgaggatcacttgaggccaggggttcaagactagccttggcaacaaatcgagactccatctctacaaaaaaaattaaaaaaataaggctaggcttggtggctcatacctgtaatcccagcactttgacaggatgaggcagctggatcacttgagcccaggtgtttaagacaatgctgggcaatatgacaaaaccctgtctataaaaaaaaaaaaatgcaaaaattagccaggtgtggtagggtgtgcctgtagtcacagctactcaggaggctgaggtgagaggatcacttgtgctcaggaggtggaggttgggatgagctgagattgcaccactccactccagcctgggcaacagagtgaggccttgtattaaaaaaaaaaaaagaagctgggcgtggtgtctcactcctgtaatcccagcactttgggaggccgaggcaggtggatcacgaggtcaggagatcaagaccatcctggctaacacagtgaaaccccgtctctactaaaaatacaaaaaattagccaggcgtggtgacgggcctctgtagtcccagctactcaggaggctgaggcaggagaatggcgtgaacccaggaggcggagcttgcagtgagccaagatcgcaccactgcactccagcctgggcgacagtgtgagactccatctcaaaaaaaaaaaaaaaaaagccagtcatgggggtgcatacctgttgtattagctactcaggaggctgaggcaggaggatcacttaggcccaggaagttgagcctgcagtgagctatgattgtgccactattgccctgtctaccctgggccccaaagtgagaccctgtctctaaaaaaagagagacataagggggtccaaggctcaaaaaaggttaagtaccactgctctagaggggaggattcccaagccctactgcccactaaaagtcagctgtggatgcatgccaagagacctaaacatttggcatagaaaattactaagctttggccaggtgcactggcttatgcctgtaatcccagcactttgggaggttgaggcgggtggatcatgaggtcaggagttcgacaccagcctggccaacatggtgaaacgccgtctctactaaaaatacaaaaattagccgggcatggtgacgtgtgcctgtagtcccaactgctcgggaggctgaggcaggagaatcgcttgaacccgggaggtggtggttgcagtgagccgagatcatgccattgcactccagcctgggtaacacagagagacttcatctccaaaaaaagggaaaaaaaagaaaaataaaaaagaaaattagctttatcaaaatgtataaaattctcgttaaagaatttcgagtaaggcgcggtggctcatgcctgtaatcccagaacgttgagaggctgaggcaggtggatcacttgaggtcaggagttcgaggccagcctggccaatatggtgaaacccaatctctactaaaaatacaaaaattaactgggcgtggtggcacgcgcctgtagtcccagctacaggctggggcaggagaatcgcttgaacctgggaggcggaggttgcagtgagccaagattgcgccattgcactccagcctaggcatcacagcaagactccatctcaaaaataaaaataaaaagaattagcagggcatggtagcatgcgcctgtgatctcagctacttgggaggctgaggcaggagaatcgctagaacccaggaggccgaggttgcagtgagccaagatcgtgccactgcactccagcctgggtgatagagcgagactctgtctcaaaaaaaaaaaaagcagaccaggtgtggtggctcacacctgtaatcctagcactttgggaggccaaggcaggctgatcgctggaactcaggagttcaagaccagcttgggcaacatggtaaaaccccgtctctactaaaaatacaaaaaaaatagccaggcatggagcaggcacctgtaatcccagctacttgggagggtgaggcacgggaatcgcttgaacccaggagatggaggttgcagtgagctgagatcgcaccactgcactccagcctgggtgacaaagcgagactctgtctcaaaaaaaaataataataataaataaatttcaacaaccatgtcaaacttaaaagttatattttaatgcctagaccttaggtgaataattctcttagtgtagctattaaaatgcctactgctctgtgtttagggtgggccatctggccaagcttcagcacatatgaggatgatgcacaaacagctagactatgaaagccctctttggcgtctgtgggatttcccatagaggggtgggtacatctgacatctgtgttctcctggccctgcaggctcacgtgatggttctatgggactctgggaggtgacagatgatgttttgaccaaaagtgatgcgagacacaatgtgtcacgggtccctgtgtatgcacacatcactcacaaggccttaaaggacatccccaaagaagacacaaaccctgacaactgcaaggttcgggctctggccttcaacaacaagaacaaggtatgaacttgtgtagggatccctgacgtgtattcctcttgcttatgtcttgggatatgcactcctttttccttccccatcagtgcttgctacatagcatggttctgagcccacagaacacctcttaaaggctgagtgatgctggtgagaaattataactgaggctctgaaacccaccccttcaattggtgtctgcagtatttctctgagtagtctatatttgtgggtcagcctcacagaattcccctagggccaccctgatttgactgtctgtcatttgcacatgcctttgcaggtgctgtattctgggcatgattttcatacttgcttctgaaaacaatcactttttttctctttggtattcattcctttttttttttttttctttttgagactgtgttttgctcctgtcacctaggcaggagtgcaatggcacgatctcagctcaaagcaacctccaccttccaggttcaagcaattcttctgcctcagattctcaagtagctgggactacaggcatgcaccgctacacatggctaattttgtattttttagtagagacggggtttcaccatgttggccaggctggtcttgaactcctgacctcagttgatccactctccttggcctcccaaagttctgggattacaggcgtgagccaccatgcctggccagtattctttactgcctactttcccttcacatttccactaagtcttaccttattgagtcagatctgatgctgaggttttaataaagcagagtgtcacccaggcgcagtgactcacgcctgtaatccctgcactttcggaggccgaggcaggcagatcacaaggtcaggagtttgagattagcctcggccaacatggtaaaaccccatgtttactgaaaatacaaaaaaattagccaggcatggtggcatatgcctgtattcccagctactcaggaggctgaggcaggaaaactataggaggtggaggttggcagtgagccgaaattgcgccacagcactccagcctgggtgacagagcaagactccatctcaaaaaaaaaaaaaaaaaaaaaaagcagtgtcagaatatacacccagagccagagaaaggcttctccagaatctgaatcaggccacagtttgaagggtagttccctcaacctcctatcccatctgtatttatggcctaagggtagattaatctctcctaaattagagtcttcacttatagaaattctcacactagattatgaaactgtccttcacatatgtgccctgctttaactctccaacaggacgttgagggagtgatagcatagtgaggagtttttcaaccatgggtgcctgtgttattgctggcagcctcaatttaatatgccattcagctaggttctgtagggtgaagtaatggtctaataattactggcacctctgctggaatcatcacgagacaggaataaaggaccctgaccttagaatcctcgcctgcttattatcgtacattagttgctatagatgataatataacctggttttcattgctcttgtaggaactgggagcagtgtctctggatggctactttcatctctggaaggctgaaaatacactatctaaggtgtgatgaacatgattttgtggttttacctaataattcaccttacagttaaaatactgtaattctagctgagcttttttttcatgtttattttatctattcatttatttttgaggcagagtctcgctctgatgcccaggctggagtgcagtggtgcaatcttggctcactgcaacctctgcctcctgggttcaaccagttcttgtgcctcagccacctgagtagctgcggggattacaggcgtctgccaacatgcccaggtattttttttgtatttttagtaggaacacagtctcaccatgttggccaggttggtatttttatttttaaagacaataaatacagggtctcactctgtcacccaagttggagtgcagtcatggctcatggatcagtgcagccttgaactcctgggcataagcgatcctcttgcctcagcctcccaagtagctgagactatgggcatgtgtcaccacacccatctggttgttttttttgttttgttttgtttttttaattttttgtagagacagagtctcactatgtttcccaggctggttttgaactcctgacctcaagcgatcctcccaccttggtctcccgaagtgctgggcattcaggcatgaaccattgcacctggtctcaattcttgtttaaaagaccagttctccaaaggcctgggcatgtttttgcacagtacatgaaattttgagtctggtgtgcctctcttgcaggaaagtcttttaaagagtaagacagggtgattctttcctattgcataagcttcctgagaggctcctttgactagcagtcctcctcaacaatgcatttaagtatttctttatagattgatgactacttggcatgctgtaagggaaggaaatcctgagtgttaggaacctttggcaattgaagatcgatcaaattaagataaaccatctctgaaataatcatgtaaggtaatgagaaaatagacttaatttacaatacaaattggtcatccctaatccagaatgctccaaaatccagttgggcacaataccttaggcctgtaatcccaacactttgggaggttgaagcaggaggattgcttgagcccaggagttcaaaactagcctgggcaacacagtaagaccctatctctgcaacaaaatttaaaaattagccatacattgtggcatatgcctgtagtcccagctactggagggtagcagtgctgaggcaggaggaccacttgagctgaggaggtcaaggctgcagtgagccgtaattttgccactgcactccagcctgggtgacagagcgagaccctatctcaaaaaaaaaaaaaaaaaaaaaaaaaaggcctggcgcggtggttcacgcctataatcccagcactttgggaggccgaggcaggtggatcatgaggtcaagagattgagaccatgctggccaacatggcgaaaccccgtctctactaaaaatacaaaaattagctgggcgtggtggtgggcgtctgtagtcccagatacttgggaggctgaggcaggagaatcgcttgaacccaggaggcagaggttgcagtgagccgagatcatgccactgcactccagcctggcaacagagcaagactctctctcaaaaaaaaaagcctccaaagtccaaaactttttgagcaccaacacaatgccacaaatggaaaatttcacatgggacacctttgctttctgacaggtcagtgtaccaaacattgtttaatgcagaaaattatttaaaatattgcataaaattaccttcactctatgtgtataagatgtatatgaaacataaatgaattttgtggttagacttgggtgccatccccaagatagctccttacatatatgtagatatttaaaaatcggggccgggtgcggtggctcacgcctataatcccagcactttgggaggccaaggtgggcggatcgcaaggtcaggagattgagaccatcctggctaacatggtgaaaccccgtctctactaaaaatacaaaaaattagccgggcgtggtggtgggcgcttgtagtcccagctacccgggaagctgaggcaggagaatggtgtgaacccaggaggtggagcttgcagtgagctgagatcgcgccactgtactccagcctgggcgacagtgcgagactccgtctcaaaaaaaaaaaaaaaaagctggagaaatccgaaattcaaaacatttgtagtcacaagccttttggataagggagattcaacaagcaacttttacatagagttaaacctacctgtgaatcatttgtcttttttttattttttttgagacagagtctcactttgttgcccaggctagaatgcagtggcacgatctcagctcactgcaacctccgcctcccaggttcaagtgattctccttcctcagcctcctgagtagctgggattacaggcatgcaccactacccctagctaatttttggtatttttagtagagatggcatctcaccaggttggccagcctggtctcaaactcctgacctcaggtgatctgcctgccttagcctcccaaagtgctgggattacagacgttagccaccacgcccagctttttctcttcttcttatccttgaggactttgcaagaggaagcagggttccaggaattagtgattccttcatgtcacaatagcctttgagctccactgaccttgtatgctgtcttatgtgttgtatgcacccactgaggatttgctaactgacgaagacccagggttaaggctgatgtgggttatctgggattaagctagtcccatgggcgtgctttctatagcgtacaattcccattcaggtgggaaggtgagctgggggtagccagagatcagcctctttatctgaaaagcactgaggtggcccttcctggcagacagaacagagtgggactatggctttagtgccctggaacgattcccagaaacaacctgaatagttgaaacagcctaccaagaaaggccttggcctttccagctacttctgattatttattccagatttaccttttccccaacctatctccttcagtatctaggtcttaccgtttattaacattcacctcctctttctcctgtatacctaggggtggaacagagtgttatttctgtaatcagggcttgattttatgtggcttttatatgagggaagcccatcaaggtgggagtccagaaacaatatccctgccttaccctctctgctgatgccatggttatatctctcctctattttcagctcctctccaccaaactgccatattgccgtgagaatgtgtgtctggcttatggtagtgaatggtcagtttatgcagtgggctcccaagctcatgtctccttcttggatccacggcagccatcatacaacgtcaagtctgtctgttccagggagcgaggcagtggtaagagtccctgtgtgcacctcaggcctacagctgcactgcatatgggttctgactttcagtttctttgttggtttccaaacaggtatagtgctctgtatggaacatttggaagtgtgttcaaaaaggggagcgatggctaggcgtggtggcttacgcctgtaatcccagcactttgggaggccgaggcgggtggatcacctgaggtcgggagtttgagatcagcctgaccaataaatatggagaaaccccgtctctactaaaaatacaaaattagccgggcgcagtggcgcatgcctgtaatcccagctgctcaggaggctgaggcaggagaattgcttgaacctgggaggcggaggttgcggtgagctgagatcgcaccattgcactccagcctgggcaatgagcgcgaaattctgtctcaaaaaaaaaggggtgtggggggagtgacacaaaagggcactagactttcaaacaccacagacaaatgtgtggccacagaagcctttgttgggagccaccagtcaggatattagttagtagtttccatgttcttttagaaagctctactttttttttgttgttgttgttttttttttttgagacagagtctcgctcttttgccaggctggagtgtagtggcgtgatctcagctcactgcaacctctgccttctgagttcaagtgattctcctgcctcagcctcgcgagtaggtgggactacaggcacacaccaccacgcccagctaatttttgtatttttagtagagacggggtttcaccatgttggccaggatggccttgatctcttgaccttgtgatccacccacctcggccttccaaagtgctgagattacaggcgtgagccactgcacctggccgagagccctactttctatcctgtggtaatttttttgctgtggtcctgcctgaactaaaattctatttatgctaagatgtggcatggtgggataaggaggaagtttacaaagggcatgaggaaacctcagggtaatgagtatgttcattatgtagattgtggttatgatgtcatggatatatacatatgtcagaacctcaaattgtatactttatgtgtcgtatattgtatgacaaacctcaataaggctgaagaaaatactgagtttagttctgaccactgagtaaattaagcttccacctcaaatcttttataacatattctctgtaagagcaccctcattctttattgaagagggaaaaaatacttattttagtgtactttgaaggtttcaaaatacctttttctgacatgccatttcatcataccaagaaccctgtgggaagcagatgagaaaacatagttttacatataagacctagagccagctaaataacttgcccagcatcacacagcttgatgggggaacagctagggaccagaatccaacttaacaaattgtattttctttatctcactttatcccatttctcgctttatcccatttctcatgcaaaaatatggctgtgttatcctgagagtcctaaaaggcacactgtggattgcagttcaccctctctttttcaagtagtgtttattcctgtgcagatactgcaaagtagcttttgttttgggttttttgtggttttttttttttttttttttttgaagacagggtcctcactctatcagccaggctggaggaaagtggtgcaatctcagttcactgcagcttttccacctgccaggctcaagcagtcctcccacctcagcctcccgagtagctgggactataagcgtccgccacctcattcagctaatttttgtatttttgtagagacaggttctcatcatgttgcccagagttgtctcaaactcttgggacacccacctcagcctcccaaagtgtgtgctaagattacagggattacagccgtgagccactgtgcccagctatttcttttttgttgttgttgttgttgagatgagtcttgctctgtcacctaggctggagtggagtggtgtgatctcagctcactgcaccctctgcctcccaggttcaagcgattctcctgccttagcctcctgagtagctgggactacaggcgcgtaccaccatgcccagctaatttttgtgtttttagtagagatggagtttcaccatgttggccagactggttttgaactcctgacctcaagtgatccactcaccttgggcctcccaaagtactgggattacaggcttgagccaccacgcctggcctatttgttcttaattatagttaaaatgcttacattttagaacaaagaataatgtataatgagagtagtagagaaaggaataaatagggccgggcacggtggctgatgcctgtaatcccagcactttgggagcctgaggcaggtggatcacctgaggtcaggagttcgagaccagcctgatcaacatggtgaaaccctgtctctactaaaaatacaaacaaaattagctgggggtggtagcgggtgcctgtagttccagctacttgggaggctgaggcaggagaatcacttgaatctgggaggtggaggttgcagtgagccaagattgtgccacagtactccagctttggcaacagagctcaaaaaaaaagagaaaagactaaataggtttggctctaataatgtatgcaatgaaaagttttaagagatttttggtactgtttaatgggggtaactttcatacctaataaggaaatactggttccacaaatattatccagttcttatgtgccaagagacatcttcatatcccaagcactgatttgatccccaagtacagcagatgtgttttccttgtgatctaaagtaattacatgacttgtcttaaacatctttgggtatttaagttctgggctttttgccactctcaaaacacctaatactagataaagacttcttgcattgtggccgggcacagtggctcatgcctataatcccagcactttgggaggccaaggtggatcacttgaggtcaggagttcaagaccagcctggccaacatggtgaaaccctgtctctcctgaaaatgcaagaattagctgagtgtgatggcaggagcctgtaatcccagctacttgggaggctaaggcaggagaatcgcttgaacccggaaggcagaggttgcagcgagccaagatcgcgccattgcactccagcctgggcgacagagcgagactccatctcaaaaaataaaaaaagacttcttgcatttgccacagtagtggttttaggtgaaatataaggaatcgttgatgacttaatgatttataaatatgcagattaccttgagttgcagtgtaggttggaaacatatgatggagaaaagcttagagttatgaaagatgatcccagagtgagttgagaggaagcaaggaagttctcagcacttatggtcttcggccaaaagcatcttgagcatcatcgggaatctgacacttttccaaggcttcttggatggtttctgtcagtgtgtggataggcaggatggcatcaggattctctttgcttttgcatgagctaacttgccattgggaaaacactgtctgatactttgtggggcgggtggaggggagcagggtggacgttgaaaactcagtgttggagaaattcaggctagcagacagtcagcaaatattctctcccgcctcactgccttttacttttctgtctttcaggaatccggtcagtgagtttctacgagcacatcatcactgtgggaacagggcagggctccctgctgttctatgacatccgagctcagagatttctggaagagaggctctcagcttgttatgggtccaagcccagactagcaggggagaatctgaaactaaccactggcaaaggctggctggtgcgtaagcccctacctgagatgactgctacacagtaacagaaaaattatcttcctctatctctcagcccccactgacacaccatctactcatactttttcactagtaagaggcactcattggaacaggaaaagacttcccccgattttgcttttatgtctgcacgttgcctgtgggaaaactgaggcccagtaaaacacactggttgacttaggattttccccaaggtgtaatagagcaagaaggataagggacctcccaccacagctgtcagtgaattttttttttttttttttttttgagacagggtcactctgttgcccaggctggagtgtagtggtgtgatcatagcttactgtatgtagccttgaactcctgggctcaagcagtcctcctgcctcagcctcccaagtagctgggaccacaggcatatgcactgtgcccggctaatttatttttttttagtagagatggggtctcgccatgttgcccaggctggtctcaaactcctgggctcaagtgattctctcaccttggcctcctaaaattctgggattacagccatgaaccactgcgccccacctccagtgaattattcaagtgtttggttcttcctcctgtgcctagcaggtggagggaaaacagaactttggttctaagtctcctgagaagaactgagccttgtatagcaattcttcagctgctccgttcttctctaacgtttagttggaaaaatgaggccctgattcccatgagaaccaaccagccaatctcctgacatgaggttgtacctgtagaaccctgttcccttaaggagaccagaaagcattcctgtcccttcctcccccttttcctgccccatggctagaggtgctaattgtagtctctttctcttcccgtagaatcatgatgaaacctggaggaattacttttcagacattgacttcttccccaatgctgtttacacccactgctacgactcgtctggaacgaaactctttgtggcaggaggtcccctcccttcagggctccatggaaactatgctgggctctggagttaatgacaactccccaaatgcagagatttacactaacttccattctcagtttccttgtttcttttgattttttttttcctaattgtgtgaggctcttgtgttttagtgggaacaccaaagtttgcctatagtttaggcacttaataggaagaagctctgtacagaaatctgaaagttgttttgctttttgttttcccctttggtaatcaaaattttactatcttttattatttctggcttttcaaccaaacattgttgctaatccctatttttctttaagtgacacacattctcctgtctctggcttcttcaggctgaaatgacatagctcacccttacttcactcttgagaggtagggctcctttataattacatggttgctctcagactttctgtgaaagtttgggagctgtgtgtgtctgtgtgtgtgtgagagagagatcttgtctgcgtgtgtgtgtgtgatcttgtgtgcctgtaggtactgtgtgtcactgaaattacctggagtgaggattacttgtaattaaaatatttataaaagaaacaactttattcacagagtccagctttgggactagtctgtatcttgttttttaagtctaacaacactgataataggaagtaaaaacagaaaggaaaagaaattaccactgggaaaatctttttagttagattgtaggcttcctggggcctcccatgccaggactgcaaagtgatccagccctacctgtcttcccacctgtgtgtcccccgtgtgggaagttggtgtcacttccccttcccaccctcacatctgcttagccagtagccacacccctaaaacatcagactcaccatccaggtgcagctccagaggctacaaaaggcttcatgggacttgaatccccatcctagcttctctctccttcccctcaagacctgatctggttttaaggggcctggagctgggagtctcaagtctgctaagattcacatccatagcccccatggctttgaggagaatcctctctgccattcttccaatctccccagtgggttttgctattattttctaaattgggttaagtctaagaaggtgggggtgagcagggggtttatctgtgtgtagtgagtgcttcatgtgtggaatattcattttcttactgcagtgggacttggggttgaagccacccctcctactctgttggcttagccctgagatggtgacaggctggcctgcagtcagcatcattgtgcatgtgacagcatcaatgtgattagtaatttgtctgttcctcccttgaactgtctgtttagtctgaggtttttaaacttgcaggcagctgactgtgatgtccacttgttccctgatttttacacatcatgtcaaagataacagctgttcccacccaccagttcctctaagcacatactctgcttttctgtcaacatcccattttggggaaaggaaaagtcatatttattcctgcaccccagttttttaacttgttctcccagttgtccccctcttctctgggtgtaagaagggaaattggaaaaaaaattatatatatattctccttttaatggtggggggctactggagaggagagacagcaagtccaccctaacttgttacacagcacataccacaggttctggaattctcatcttcgaacctagagaaataggtgctataaacagggaattaagcaaaatgctggatgctatagatcttttaattgtcttaattttttttctattattaaactacaggctgtagatttcttagttctcacagaacttctatcattttaaactgacttgtatatttaaaaaaaaaatcttcagtaggatgttttgtactattgctagaccctcttctgtaatgggtaatgcgtttgattgtttgagattttctgtttttaaaaatgtagcacttgactttttgccaaggaaaaaaataaaaattattccagtgcacaatggtgtgagtgagtattgtgtagccaggagcctgccaaaaaggccccacatgactagttggaaggttggcttgagctgttgggattgcttgtggcagaaggggaacacaagccattacctccaggttagaggcaggtcaagtgcaggcacaaatactaagacctgcttgctctgggtccccaactctagcccaagatgagttgctctgaggtccagctgagggtggatatgcccagggtactgaagtagtgtgacgttacttctgttacataagtaagggttggtaataggccctgtctgcttggatggtgccctgagaatgacgctgaaagtgcttgcatagtactctgggaataggatattaatttttgttttttgtagttggaaccatagaccttcactgccctttgtaaggggaagacacagtgaccacagtgagtgatgctcttctagagcctatttggagctgtagctgagagaaactgccaaatcataccacccttcctcacacagtcatctctgggaaacccaccagggctaggccgcagagcctggcaaggccgtccctattcttctgccacatggtacttgttctttccagggcaagctggacacagctgctctatgcacctgccttagagactgactggttcagaacatgacacatgggttcctatatgatcaaaggctgcaagacaggaaggggagatgagtaagttaaagcaatttgagagggctccccagaggagacgagttacatttggaaagggctgaaactagcctttcccaaaatgaatttagaaggtatttgtaaaatcttcattgtcagccgggtgcagtggctcacacctgtaatcccagcactttgggaggcccaggtgggtggatcacctgaggtcaggagtttgagaccagcccagccaacatggtgaaaccccatctctaccaaaaatacaaaaattagctgggcgtgttggcgggtgcctgtaatcccagctattgggaggctgaggcaggagaattgcttgtacctgggaggcagaggttgcagtgagccgagattgtgccactacactccagcctgggcaacagagtgagactccatctccaaacaaaatatattgtcaaatcatttttgggaaatgcagattagaacaaaagcagcttcattcctttaccatcaggtttttttatttttaaaaattggaaaggagagctttatttctcaaagggttgcagtctgcagggtggccattctgacagtctgggaagtacagcctctggccagaagtcagaaacacaaactgagggaggggcaaaggggacaggaatttatgttgaacaaggtggctgaatatatgtatttaataagctataggaggagtcatgaatatttataaaaggaaaaaggtacacatgtgcaactgaactcttaggtttttggtattttactatgggacttgttccatagaacatgctcacaaagaaaggtgacttagggaatgtggggttgacttggtctaggcctctggcctccatggaatcttggccttgctcccactttccagccagactttccagcaaagcatgtatcacagaagggctttgtgggctttatggggtccctttttagccagcagtccctactcccttctgtgaaagaacttcttgttctctctcaggcacttcttgttctgtctcaggccgcatgccacatgccttattccaaatagtctgctggctcctcatcctttgggtccttctacaggaggctttgtagctgaactgaattcttagcccttcatgacttgtttatgctccaagtccctggtcccctgccaactctaattgattattgatctggccctgtgttcctaataaaactaaagactgcccgcagtccaggccactctgatccagctgccattcctcgtgcagatacccagaaatagcaagtcaggatgtccatacctgtatcagcaccagggatcaatcttttaggagttagcctacgatccaagtgtttttgttctgcttttcagttgctggtatctagaagacaacaatgaggagtggggggtggacaggagaaggaatcactcagtgttatttgcttcatgctagttcattcatatctttcttcacgctagtgtgctgagataactgaaatgtttgggaggatggaaacataggctgctaattctgaaaccagtgatgaagacaataaattgctcaggtttcttagcttggttctgcccttagctcctccaaagaagaatccaatgaaagaaatgtgagacataggaatactaccactggagagaaaggtgtgaactgaactcaagatggagatggagttgtgagctcttttatgattccactctccaagagaggtgtggactatcctctatcagaatccccctgggttgggcctcacatctgaacactcttcttgattagtgtggaactgccgaagtcaggatttttaaggcataataatactatttaacagtactcaggccgtgtgcagtggctcacacctataatcctggcactttaggaagccgaggcaggcagatcacgaggtcagaagatcgagaccatcctggccaacatggtgaaaccctgtctctactaaaaatacaaaaaattagctgggtgtggtggctcgtgcctgtaatcccagctactctggaggctgaggcaggagaatcgcttgaacccaggagttagaggttgcagtgagtcgagatcacgccactgcacttcagcctggcaacagagagagactccgtctcgaaaaaaaaaagtgctcatagtcacatgtttactatgcttcttgttaagctgtaaggtgtattcagagctataattaacattgctagcgctatggacaggaagaaaacagatgatcaactcataccttaaaataaactgagctgggtgcagtggcttacacctgtaatcccaacactttgggaggctggggtggattgcctgaagccaggaatttgagaccaatctggccaacatagtgagaccccatttctacacataattaattagccttgcatggtgatgcccacctatagtcccaggtacttgggaggcagagacaggaagatcacgtgagcccaggagtttaaggctgcagcgcgccaggattgtgccactgcactccagcctgggcaacagagcaggaccctgtctcaaaaaaaaaaaaaaaaagaaagaaactggccaggcgcagtggctcatgcctgtaatcccagcactttgggaggccaaggcagaaagattgcatgatactaggagctcaagatcagcctgggcaatatagcaagacctggtctctacacaaaattgaaaacttagccaggcatgatggtgcacaggaagactgtttgagcccaggagtttgaggctgctgtgaactatgattgcgccactgcactccaacctgggtgacagagcaagaccctgtctcaaaaaataataataggctaggcgtggctgctcacacctgtaatcccagcactttgggaggccgaggtgggcagatcatctgaggtcaggagtttgagaccagcctggccaacatggcgaaaccccacctctaccaaaaaatacaaaaattagccgggcgtggtggtgtgctcctataatctcagctactcaggaagctgaggcaagagaatcgcttgaacccaggaggcagaggttgcagaaagccgagaccacaccattgcactccagcctgggcaacagagtgagactccgtctcaaaaaaaaaattctccccttgggcctcgagaaagagcattgcatgagattggcgtcttgttttcagagttctggactccaaaactatgagagaatgactctgttgttttaaaacccaccaagttaggctgggcacagtggctcatgcctctaatcccagcactctgggaggctgaggcgggtggatcgcctgagctcaggagttcgagaccagcctgaccaatatggtgaaaccccgtctctactaaaaatacaaaaaattggccgggcgtagtggcatgcacctatagtcccaactactcgggaggctgaggcaggagaattgcttgaacctgagagatggaggttgcagtgagctgagatcgtgccactgcactccagcctaggcgacagagcaaggctccgtctcaaaaaaaacaacaaaaaacaacccaccaagtttgtggtaatttagaagtattctgaggaatttttagataccaatttttgtaaaatcacactagatcaaaggaaaatattttctcttacaataatacacagataaactgtaatattagtgctaagacttaaaaaagcaaaaagtaaagctcagaaccatgactgaattgatactggaggaagtgatcatcaaatctgcataccactggttgctttttcctacctatttcaaactatctcaacttttttttttttttttgagacagagttttgctcttcacacccaggccagagtgcaatggtgcgttctcagctcactgcaacctccgcctcccaggttcaagtgattctcctgcctcagtctcccaagtagctaggattacaggcgcccaccaccacacgtggctaatgtttgtattttaagtagagacagggtttcaccatgttggccaggctggtctcaaactcctgatccaccacattggcctcccaatgtgctgagattacaggcgtgagccaccacacccggccctttttttttttttttttttttaaagcagagcctggctttgtcacccaggctggagtgcagtggtgcaatctcagctcactgcagcttgtgcctcctggattcaagtgattcttgtgcctcagcctcctctgaatagctgggattacaggcacacaccaccacacctggctaatctttgtatttttagtagaggaggggttttgccatgttgcccaggctggtctcaaactcctgacctcaagcagtccgcctgccttggtctcccaaaaagtgctgggattacagacttgaaccaccgcgcctggtcaatgttgtttttttgtttgtttgattttctgtttgttttttcttgagacggagtctcaggctgtcacaaggctggaatgcaatggcatgatcttggctcgctgcaacctccaccgcccaggttcaagcaattctcctgcctcagcctaccaagtagctgggattacaggcgtgtgccaccatgcccagctaattttgtatttttttctttttcttttttttttttttttttgagacagagtcctgctctgccacccggaatggagtgcaatggcatgatctcagctcactgcaacctccgcctcctcggttcaagcaattctcctgcctcagcctcccaagtagctgggactacaggcgcctgccaccacatctggctaatttcttttttttttttttttgagacagagtttcgctcttgttgcctaggctggagtgcaatggcgcaatcttggctcactgcaacctccacctcccaggttcaagcgattctcctacctcagcctcctgagtagctgggattacaaacatgcgccaccatgcccagctaatttttgtactttcagtagagatggagtttctccatgttggtcaggctggtctcgaactcccaacctcaggtgatccacccacctcagcctcccaaagtgctgggattacaggcgtgagccaccgcgcccggctaatttttgtatttttaatagagacggggtttcaccatattggccagactggtctcgaactcctgacctcatgatccgcctgcctcggcctccaaagtgctaggattacaggcgtcagccaaggcgcctggccattttttttcttttttttctaaacagagtctcactctcgtcaggctggagtgcagtggcgcgatcttggctcagtccaacctctgcctcccgggttcaagcgattctcatccctcagcctcccgagtagctgagtctctatgcccgtgccaccatgcccagctaattcttgtatttttagtagagacgggatttcaccagcgtctggccaggatggtctcaatctcttgacctcatgatctgcccacctcagcctctcaaagtgctgggattacaggcgtgagccaccacacccggccttaatgttttttttttttttaaacagagacagggtttcgccatgttgccaaggctgatctctcaaactcttgagctcagatgatcctcctgcctgccttgtcctcccagagtgctgggattacaggcgtgagccaccgtgcccggcctaatttttgtatttttaatagagacagggtttcaccatattggccaggctggtctcgaactcctgacctcatgatccgcctgtctcggtctccaaagtgctgggattacaggcgtcagccaaggcgcctggccattttttttcttttttttctaaacagagtctcactctcatcaggctggagtgcagtggcgcaatctcggctcaccccaacctctgcctcccgggttcaagcgattctcctgcctgagcctcccgagtagctgggtctacatgcccatgcaaccatgcccagctaatttttgtatttttaatagagacgggatatcaccagcatctggccaggatggtctcgatctcttgacctcgttatccgcccacttcagcctcccaaagtgctggaattacagacccgagccactgcaccgagcctatctcaacattttgaacttgtactcgaagacatcctttcaaagtgcaggttgtagagttttaggatgctttctcatcttgaacaagccaagaaaacgtacagctatcttgggtctcctttgatagcagaagataataagagatctagctaagacctgagatacctaaacttgccttgctatggaatctgccttgcaggcacctgggcagacctagagttgctagccaggatgtcataggattctcaaagatgatggaggttgcgtgagtcatcacagatgatgtcagctttgatgttattgttctgaggctatcagtttatttaactggtgactgtggtctttatcaggaactcttagcctatcaaatggtatttatggtgttgaaaaattagtattattttttgagacacagtctcactctgttgcccaaactgtacctgggcctattgttttgtgtttgtttgtttgtttgttttttgtcgctcaggctggagtgcagtagcacgatttaggctcactgcaacctccgcctctctggttcaagcaattcttctgtctcagcctcccaagtagctgggactacaggcgcctgccaccatgcccggctaatctttgtattttttttttagtagagacggggcttcaccatattggtcaggctnnnnnnnnnnnnnnnnnnnnnnnnnnnnnnnnnnnnnnnnnnnnnnnnnnnnnnnnnnnnnnnnnnnnnnnnnnnnnnnnnnnnnnnnnnnnnnnnnnnnnnnnnnnnnnnnnnnnnnnnnnnnnnnnnnnnnnnnnnnnnnnnnnnnnnnnnnnnnnnnnnnnnnnnnnnnnnnnnnnnnnnnnnnnnnnnnnnnnnnnnnnnnnnnnnnnnnnnnnnnnnnnnnnnnnnnnnnnnnnnnnnnnnnnnnnnnnnnnnnnnnnnnnnnnnnnnnnnnnnnnnnnnnnnnnnnnnnnnnnnnnnnnnnnnnnnnnnnnnnnnnnnnnnnnnnnnnnnnnnnnnnnnnnnnnnnnnnnnnnnnnnnnnnnnnnnnnnnnnnnnnnnnnnnnnnnnnnnnnnnnnnnnnnnnnnnnnnnnnnnnnnnnnnnnnnnnnnnnnnnnnnnnnnnnnnnnnnnnnnnnnnnnnnnnnnnnnnnnnnnnnnnnnnnnnnnnnnnnnnnnnnnnnnnnnnnnnnnnnnnnnnnnnnnnnnnnnnnnnnnnnnnnnnnnnnnnnnnnnnnnnnnnnnnnnnnnnnnnnnnnnnnnnnnnnnnnnnnnnnnnnnnnnnnnnnnnnnnnnnnnnnnnnnnnnnnnnnnnnnnnnnnnnnnnnnnnnnnnnnnnnnnnnnnnnnnnnnnnnnnnnnnnnnnnnnnnnnnnnnnnnnnnnnnnnnnnnnnnnnnnnnnnnnnnnnnnnnnnnnnnnnnnnnnnnnnnnnnnnnnnnnnnnnnnnnnnnnnnnnnnnnnnnnnnnnnnnnnnnnnnnnnnnnnnnnnnnnnnnnnnnnnnnnnnnnnnnnnnnnnnnnnnnnnnnnnnnnnnnnnnnnnnnnnnnnnnnnnnnnnnnnnnnnnnnnnnnnnnnnnnnnnnnnnnnnnnnnnnnnnnnnnnnnnnnnnnnnnnnnnnnnnnnnnnnnnnnnnnnnnnnnnnnnnnnnnnnnnnnnnnnnnnnnnnnnnnnnnnnnnnnnnnnnnnnnnnnnnnnnnnnnnnnnnnnnnnnnnnnnnnnnnnnnnnnnnnnnnnnnnnnnnnnnnnnnnnnnnnnnnnnnnnnnnnnnnnnnnnnnnnnnnnnnnnnnnnnnnnnnnnnnnnnnnnnnnnnnnnnnnnnnnnnnnnnnnnnnnnnnnnnnnnnnnnnnnnnnnnnnnnnnnnnnnnnnnnnnnnnnnnnnnnnnnnnnnnnnnnnnnnnnnnnnnnnnnnnnnnnnnnnnnnnnnnnnnnnnnnnnnnnnnnnnnnnnnnnnnnnnnnnnnnnnnnnnnnnnnnnnnnnnnnnnnnnnnnnnnnnnnnnnnnnnnnnnnnnnnnnnnnnnnnnnnnnnnnnnnnnnnnnnnnnnnnnnnnnnnnnnnnnnnnnnnnnnnnnnnnnnnnnnnnnnnnnnnnnnnnnnnnnnnnnnnnnnnnnnnnnnnnnnnnnnnnnnnnnnnnnnnnnnnnnnnnnnnnnnnnnnnnnnnnnnnnnnnnnnnnnnnnnnnnnnnnnnnnnnnnnnnnnnnnnnnnnnnnnnnnnnnnnnnnnnnnnnnnnnnnnnnnnnnnnnnnnnnnnnnnnnnnnnnnnnnnnnnnnnnnnnnnnnnnnnnnnnnnnnnnnnnnnnnnnnnnnnnnnnnnnnnnnnnnnnnnnnnnnnnnnnnnnnnnnnnnnnnnnnnnnnnnnnnnnnnnnnnnnnnnnnnnnnnnnnnnnnnnnnnnnnnnnnnnnnnnnnnnnnnnnnnnnnnnnnnnnnnnnnnnnnnnnnnnnnnnnnnnnnnnnnnnnnnnnnnnnnnnnnnnnnnnnnnnnnnnnnnnnnnnnnnnnnnnnnnnnnnnnnnnnnnnnnnnnnnnnnnnnnnnnnnnnnnnnnnnnnnnnnnnnnnnnnnnnnnnnnnnnnnnnnnnnnnnnnnnnnnnnnnnnnnnnnnnnnnnnnnnnnnnnnnnnnnnnnnnnnnnnnnnnnnnnnnnnnnnnnnnnnnnnnnnnnnnnnnnnnnnnnnnnnnnnnnnnnnnnnnnnnnnnnnnnnnnnnnnnnnnnnnnnnnnnnnnnnnnnnnnnnnnnnnnnnnnnnnnnnnnnnnnnnnnnnnnnnnnnnnnnnnnnnnnnnnnnnnnnnnnnnnnnnnnnnnnnnnnnnnnnnnnnnnnnnnnnnnnnnnnnnnnnnnnnnnnnnnnnnnnnnnnnnnnnnnnnnnnnnnnnnnnnnnnnnnnnnnnnnnnnnnnnnnnnnnnnnnnnnnnnnnnnnnnnnnnnnnnnnnnnnnnnnnnnnnnnnnnnnnnnnnnnnnnnnnnnnnnnnnnnnnnnnnnnnnnnnnnnnnnnnnnnnnnnnnnnnnnnnnnnnnnnnnnnnnnnnnnnnnnnnnnnnnnnnnnnnnnnnnnnnnnnnnnnnnnnnnnnnnnnnnnnnnnnnnnnnnnnnnnnnnnnnnnnnnnnnnnnnnnnnnnnnnnnnnnnnnnnnnnnnnnnnnnnnnnnnnnnnnnnnnnnnnnnnnnnnnnnnnnnnnnnnnnnnnnnnnnnnnnnnnnnnnnnnnnnnnnnnnnnnnnnnnnnnnnnnnnnnnnnnnnnnnnnnnnnnnnnnnnnnnnnnnnnnnn

SEQ ID NO: 842 - DNA, 3654 bp, Homo sapiens
tatccgaagtgcggctgcgcaagggtgacggcgcgcgagcaagggggagggggtgttttggttctagccgctcgccgtccttgcaggctctgccgtcggaaagccgctcattctcgcttccccttccctttcccggctcaagtccttcctctctctttcctttctttccgcctatcttttttctgctgccgctccgggtccgggccattttccgggccgggcgcactaaggtgcgcggccccggggcccagtatatgacccgccgtcctgctatccttcgcttcccccgccccatgtggctgcggggccgcggcggcgctgcccactatggcccggaaagtagttagcaggaagcggaaagcgcccgcctcgccgggagctgggagcgacgctcagggcccgcagtttggctgggatcactcgcttcacaaaaggaaaagacttcctcctgtgaagagatccttagtatactacttgaagaaccgggaagtcaggctacagaatgaaaccagctactctcgagtgttgcatggttatgcagcacagcaacttcccagtctcctgaaggagagagagtttcaccttgggacccttaataaagtgtttgcatctcagtggttgaatcataggcaagtggtgtgtggcacaaaatgcaacacgctatttgtcgtagatgtccagacaagccagatcaccaagatccccattctgaaagaccgggagcctggaggtgtgacccagcagggctgtggtatccatgccatcgagctgaatccttctagaacactgctagccactggaggagacaaccccaacagtcttgccatctatcgactacctacgctggatcctgtgtgtgtaggagatgatggacacaaggactggatcttttccatcgcatggatcagcgacactatggcagtgtctggctcacgtgatggttctatgggactctgggaggtgacagatgatgttttgaccaaaagtgatgcgagacacaatgtgtcacgggtccctgtgtatgcacacatcactcacaaggccttaaaggacatccccaaagaagacacaaaccctgacaactgcaaggttcgggctctggccttcaacaacaagaacaaggaactgggagcagtgtctctggatggctactttcatctctggaaggctgaaaatacactatctaagctcctctccaccaaactgccatattgccgtgagaatgtgtgtctggcttatggtagtgaatggtcagtttatgcagtgggctcccaagctcatgtctccttcttggatccacggcagccatcatacaacgtcaagtctgtctgttccagggagcgaggcagtggaatccggtcagtgagtttctacgagcacatcatcactgtgggaacagggcagggctccctgctgttctatgacatccgagctcagagatttctggaagagaggctctcagcttgttatgggtccaagcccagactagcaggggagaatctgaaactaaccactggcaaaggctggctgaatcatgatgaaacctggaggaattacttttcagacattgacttcttccccaatgctgtttacacccactgctacgactcgtctggaacgaaactctttgtggcaggaggtcccctcccttcagggctccatggaaactatgctgggctctggagttaatgacaactccccaaatgcagagatttacactaacttccattctcagtttccttgtttcttttgattttttttttcctaattgtgtgaggctcttgtgttttagtgggaacaccaaagtttgcctatagtttaggcacttaataggaagaagctctgtacagaaatctgaaagttgttttgctttttgttttcccctttggtaatcaaaattttactatcttttattatttctggcttttcaaccaaacattgttgctaatccctatttttctttaagtgacacacattctcctgtctctggcttcttcaggctgaaatgacatagctcacccttacttcactcttgagaggtagggctcctttataattacatggttgctctcagactttctgtgaaagtttgggagctgtgtgtgtctgtgtgtgtgtgagagagagatcttgtctgcgtgtgtgtgtgtgatcttgtgtgcctgtaggtactgtgtgtcactgaaattacctggagtgaggattacttgtaattaaaatatttataaaagaaacaactttattcacagagtccagctttgggactagtctgtatcttgttttttaagtctaacaacactgataataggaagtaaaaacagaaaggaaaagaaattaccactgggaaaatctttttagttagattgtaggcttcctggggcctcccatgccaggactgcaaagtgatccagccctacctgtcttcccacctgtgtgtcccccgtgtgggaagttggtgtcacttccccttcccaccctcacatctgcttagccagtagccacacccctaaaacatcagactcaccatccaggtgcagctccagaggctacaaaaggcttcatgggacttgaatccccatcctagcttctctctccttcccctcaagacctgatctggttttaaggggcctggagctgggagtctcaagtctgctaagattcacatccatagcccccatggctttgaggagaatcctctctgccattcttccaatctccccagtgggttttgctattattttctaaattgggttaagtctaagaaggtgggggtgagcagggggtttatctgtgtgtagtgagtgcttcatgtgtggaatattcattttcttactgcagtgggacttggggttgaagccacccctcctactctgttggcttagccctgagatggtgacaggctggcctgcagtcagcatcattgtgcatgtgacagcatcaatgtgattagtaatttgtctgttcctcccttgaactgtctgtttagtctgaggtttttaaacttgcaggcagctgactgtgatgtccacttgttccctgatttttacacatcatgtcaaagataacagctgttcccacccaccagttcctctaagcacatactctgcttttctgtcaacatcccattttggggaaaggaaaagtcatatttattcctgcaccccagttttttaacttgttctcccagttgtccccctcttctctgggtgtaagaagggaaattggaaaaaaaattatatatatattctccttttaatggtggggggctactggagaggagagacagcaagtccaccctaacttgttacacagcacataccacaggttctggaattctcatcttcgaacctagagaaataggtgctataaacagggaattaagcaaaatgctggatgctatagatcttttaattgtcttaattttttttctattattaaactacaggctgtagatttcttagttctcacagaacttctatcattttaaactgacttgtatatttaaaaaaaaaatcttcagtaggatgttttgtactattgctagaccctcttctgtaatgggtaatgcgtttgattgtttgagattttctgtttttaaaaatgtagcacttgactttttgccaaggaaaaaaataaaaattattccagtgcaca

SEQ ID NO: 843 - protein, 449 aa, Homo sapiens
MARKVVSRKRKAPDGAGSDAQGPQFGWDHSLHKRKRLPPVKRSLVYYLKNREVRLQNETSYSRVLHGYAAQQLPSLLKEREFHLGTLNKVFASQWLNHRQVVCGTKCNTLFVVDVQTSQITKIPILKDREPGGVTQQGCGIHAIELNPSRTLLATGGDNPNSLAIYRLPTLDPVCVGDDGHKDWIFSIAWISDTMAVSGSRDGSMGLWEVTDDVLTKSDARHNVSRVPVYAHITHKALKDIPKEDTNPDNCKVRAFNNKNKELGAVSLDGYFHLWKAENTLSKLLSTKLPYCRENVCLAYGSEWSVYAVGSQAHVSFLDPRQPSYNVKSVCSRERGSGIRSVSFYEHIITVGTGQGSLLFYDIRAQRFLEERLSACYGSKPRLAGENLKLTTGKGWLNHDETWRNYFSDIDFFPNAVYTHCYDSSGTKLFVAGGPLPSGLHGNYAGLWS

SEQ ID NO: 844 - DNA, 90141 bp, Mus musculus
  misc_feature (1)...(90141): n = A,T,C or G
tgaagtcacctaaaagtccctgaaacaatatgtaaaaattagtttagggaaagcttcagtttgctgccttatcaagcagtaaatggtggtctataatttcatttcaagtgtatcagccattttattgcaaatatctggttttaagactttcaatttaaaagtccttacttaaagcttagtttcactgaagaacaagtagaggggttggtgaggtgtctcagtggttagtgcacttgcttgctgccatgcctcatgacctaagtgagtgtggtcctcagagctacctggtagaaggagaactaactcccacaagttgtcctctgagctccatgcacttgcatgtgtgcacacacgctaagtaatccaatgtggtttaagagggaagagcaggtagagtttagctgtcgaggctagcgagtcttgaggaggaagagaaattgcagtagctgagctcctgattctcctgggactgactgagaagctacagcggctacggtgtaccaagaagctcttgtgtagttaaaatccagagcaggggggtcctccccgagcttgcaagcaggaaagcaggcgaagttaagatttaagctgcggtgggctgaatgtgtttccttagtattgctggctgaagctctaatcgccactgtgatagcccgggaatttggcatacaagggtggtggggaagcttttgtgataagattagtgtctttgtgtgaagagacaagaaaacccttgccagaacttgatcattctgattccttggtcccagacctcctagtttctgtgtctatttgtgccatctactcaaaaagtaatttgggccaggcgtggtggcgaacgcctttaatcccagcactcgggaggcagaggcaggtggatttctgagttcgaggccagcctggtctacaaagtgagctccaggacagccagggctatacagagaaaccctgtctcgaaaaaaaccaaaaaaaaaaaaaaaaaaagtactttgggagagcagcccaaactgacaaagacaaagtaggcagaggataagagggatccccaagaaaggggaggacaatgtaaggagaaagatagacagcaggaatgttggatggccccacctgcagttgacaagctaccatgtctgccacagatttccacagagacagtcacttaaaacaatacaaatgtattgtctcaccgttctggtggccagagatctcaactaaagccaggtgttggcagggggtgtttcttctggaggcttcatgtaggaagatccgtttcgtggtttctcccagttgttcagagctgccagccttccttaatctgtcattccaatggtagtctgagctctgcctggatggtttggcctggtacatccttttgtgtagttttatctccctcccttcctttggtaggcatgctcaggattatatttagcccctctctaccataacctacaaatgatctcttcatctcaagagccttagcttagctacaattgcaaagggctttttggaggttggggatttagctcagtggtagagcgcttgcctagcaagcgcaaggccctgggttcggtcctcagctctggaaaaaaaaaaaagacaaaatagcaaagggcttttgacgtagcaggccacactctttccttgttagaggtattagggtccagatcctaagaccgaaaataaagagcaaggtggagagtagagagatgaggtagggggagctagcacctggtcacaaagaccttggaagctgtagtaaagtgcacagatgcccttacatggaataaagaggcttggaaagaggtcaggtggggtcctaagagatgatactaagccaggcagtggtggtgcacgcctttaatcccagtacttaggaggcagaggcaggtggatttctgagtttgaggccagcgagttccaggacttccagggctatacagagaaaccctgtctcagaaaaacaaaaacaaaaaacaaacaaaaaaaagagatgatactgactgcagtgtgatggatcataatgcatgaatgaaggtaggttgagaggcctgccagaggctgaagcgacactgtcatagtactgggtgtacaagtgtgtaatgtgtagggtagaaagcatcaggggcttacctcatctgtaaatgagcagttctgtttagctgggtgagaagacgcctgtcgtctcagcactaaggaagctgaagctggaggatcctgagtttgagattagcagagccattacaagacattatgtagacaagcaagcaagcaaacaaacaaacaaacaagatagtttagcaataaaacagatcagtgtgttcatttgaaatacacccaccatcttctgctttctgtcttattcagagccacagtggaaggctggatatttatgccactgggtggcttcaacctttgtgtgttttagggcacacagccaaggaagggatggatggtccagcattcgaaattctgatccctaacggttcaaatgtcaactatttcagagaaaatgtcagtcattcctctgaaactagggagccaccaggtaaggacatttatggttattctgtttctgaacagataattctgacatctagtccattattttattctttctttttttttttttcctttggttttttgagacaaggtttctttgtataatagccctggctgtcctttcttgctttgtaaaccaggctggacttgaactcacagagaaacacctgcctctgactcctgcgtactgggacagtccataagtctatctatctatctatctatctatctatctatctatctatctatctatctatctatctatttatctatctatctatctatctatctatctatctatctatctatctatctatacattttatcacagacttcagccttcaatgcttcccatcacccactttctcccaatggaagtgaaagtataacaaagtaaaaacagaattctaggcctttaggcccaggcttgggaatgtggcctttgtaaaggtatgctaatcataaaagagattcctccacccacccgcttcctgggttcaaagagtgctcattcaaagaaagtcaccctgaccattaccagaacctgcaatgcaaatgtgctattgtaaggggctcttagaagctgtcttgagagttaacaattaccaggtattccttgtgactcttgtaactttgcacttccttgtgactcttaactggtatctttggtatcttccaacaacgccctccccacttccttgagttgtggtttcttcctttaaatacccccttacccagctactcggggcgccacggtcctctacccctgcgtggtgtatgaccatgggcctgagagcgctcttgaataaaaatcctcttgcagtttgcaacaagactgtttcttgtgggtgattttggggtgtcgcctctcctgagtcagaacatgggggagtcctcacgttgtgggtctttcagaaggagaggaaagctacatcatttatccttccccctgagattaaaaaaacaaaaacaaaatagggctggagagatgactcagcagttaagagcacggactgcagtggctcctccagtctccttcagcctgctttcttacagcagcactctctcttccaagtcctctgccctggttcctgattccaggttcctgccctgacttccctccggattggactgtcatatgaattaaaccctttcctcctcaagttgcttctggtcatgtgtttatcacagcaatagagaactacagtagaacaatgaggaagaacctggtggtcgattagtaatgcctgctgtgggcagtatgtgccaagtatttaacactgatttacagtaattgttcttaaagacattgtggcaactattctaatatcaactctttgaatttatattgtaaggtaatcgataaattgggtcatttcatggaaattgggggctatgaaaggtgacagaaccactttttttgctgtacaaccttggataggttgacttaattgctgaacgtgtttcgtgtttcctgatttgtttaaccgagatggaaagctcacaagacagggcttgtggggttggaaattgtgtgtgtgtgtgtgtgtgtgtgtgtgtgtgtgtgtgtgagannnnnnnnnnnnnnnnnnnncatgttccgaaatgcttcgttacttgctcacaatcatgcagatatcaagcggtggctccagaaactgaatacatgtgtgatcacgtgagtctctcctgcactgagtacatgtaaggtgtgaacacacaacatgctaacaaaagcacgctctgagaatgttctctccaggtgagtgagtgacactgtcgactcttctccttcccataagtcccagtgacaaatcagtgacaaatcagtgacaaatcagtgacaaatcagtgttctagtccaccaaagttccctcaggcaaccaatatgttcattaggcttacttacacagcatgggtgaggggttaccagcaggaacatgagtgactttaaaacagaggtgctgggagggaggtctaaacccaaaatgaacaatggctgggccgatgaagcctcactcagttaacctccctcagcccgtatactagctctattgggagaccataagcattttgtgcagaattgcatacaaatatctgggaggctagatattcagtggcccttccatctttctgtgaaggaatgccatcaggctatataagcctgcctaggacggtctgcacgcaggcagagctggtcttacgaagatggtggttgctctgctcggaggatagtcctgtgcaacacaagtacttagcacactcgtggaagggtttgtagaaacacttggaaaactctatgacaggcacattgttgggtaaagactctcgctgctactgttacatcttgaaggttgtatttatacagggcgagtgagtgggccacagattgttcaagaaacaactttaggcagggagtcattttgagggccagtatcaggatctcaccatgcccccccccccaagtactacaacagatacaaggctgagaaagtaccttgattcatacaactgggatgtcaggagcagcgtgctctcagggtcagcttattggcctgagcctgttctaatcccactgtaaccagggtacccaggaggctgggcttccccaaggaagttgtacttagtcacgtgatgacaccaaagagaatcttaaaagcatggcctactagaagacacgcactagaacacaacatgtcccatgagatttgagtggacttgggtccctttttcaaatttagttcttaggttgttgtcaacccccaaagcagcactcatttcaaaaggaataagacataattttttctggagcaaaatatgagttattatagcctaggaccatgcactcaggttgccctaaaggacacacttcagcataaaagtggttacaagagattttattaaagaacaaaggtcactgggcagtggcggcacacacctttaatcccagcactcaggaggcagaggcaggtggatctctgtgagttcgaggccagcccagtgtacagtgcagttgtctttgctgctttgtggtcgcccccccgcaccctctaaccataccccctaaccacaccctcatttcagcccatcactagataggagagaaaggatagaagggaaaagagagagatagagatccctgaatctaatttcttcttgttttttctttgcttgtagctggtctttgctactttgtgggttcttctctttcccatcttttatcccccagtttcacacttatcaccagataggagagaaagaaaggtagtggagcgagagagagagacatagagatctataaatctaattaggctttttatttctttgagcatgactactaacaaaccataatcaatgccccctccccctgatgaccaacaactacctgccctacctcctagggcactagcatttatataccctctgaaaatttcccagaattccaaaggtcacacaattatagaaaccatctgcagctggcaaagccaagcctctgctagagcacaaggcaaatcatagtcagctgctggaaaatatccctatatcccccactcctgagatgaaaacaaaaacatattcttatagtatatctgttttttttttttcaaagaaaaaaccagcaaaattccagaattgtcaccagagtgagttacagaacagccagagctacccagaaaaagtctgtcttggggggcaaagacataaatgtaggcattaaccaaaaaacattagtagggtacaagtaggtaagctatatcaaggaagggaaaactctattaagtatttagatattctctgatgacattcttagcttttggatggataagacctagtgggttgctaaaactatattttaaaggttttaccttatggttagaggatgttaggttagacacaggggtgggcaatgagtggccattaaggggactataaaaacagccaagataatttggctctgaatctgcagtgttaactctccacaattatgaagttgtagtcaagttttcagccgtgcagcatcttccacacaggtgtggcctttatctctcgccttgtctcccagctctgcaacgcaagagtcctacagctcagtcctttgactctcctggcaaccagatgtgtgtttgaaagtctcaggatcatgcaggaagcacagaccggccgttgggaaatgaaagcacacattcattctcttgcttggtacgttttgagctcttactccggatcatgaatatccttggctgtgccaagtcatagacacccagaactggagcagacccagtccctgctccgtaggagctctgtaggaagaaagatacatcaaccagcaactttgacagcagcatgctgagtcctacgggaggtgaaaaccaaccaacccagagtattacaggaggccatacaaatacttctcagtttataacacctcagtttctcttctattagagttcttttcttcactgcaaattctacccgatgcctgtcagttctctttggccgttagaacccttttgaaaggtgcagcaagttcccttttcattgagacttgggaacagagtatagtaggatgacagaatctcttccatttgctgagctggggccccaacacaattcaggcaacactcacaggccttgtaccctttggtaaagagtttgctatgtgacttattgtttacaggaacttaggttttgtagttgagagatttgccggcttgagggatcatttggatgcactttgagccctttttgttaggagacaggaagccagaccggaagtagccacccacggaggaggctttgctgttgggtacaagtgactggcttgagtgacaaaaggcacagattctctaagctcttcctgcactctgctttggctttacagggattagaagtttgaaggatggaatgtcagaagcactgcccatcttatgctgggccctggactctgagctttgagcccccgggtagcatgggtgttcggtgctgactcacagctctgagcacgtgtcaagcacctcccattcccaaaaggttttagctatgaaggtgacgccttgttatataaagagcagctcaagtcaatgaatatgtgcactgacagcaaatctgactataatttgcgatggtgatatcagggggtctgaacaaagcagttacatagctcagtaaaatgtttatacaactgacacaaacatttgctgactgagacttcaaagaccccagacctatgagnnnnnnnnnnnnnnnnnnnntgttggaggcggaaccctcagccttgcacatgctaagcagcctctgagctccacccacaccatgcacatgctaagcagctcactatcactgagctccacctctgctacatccactccagtagtgacaagcgcgacaggccccgaaaacctgggcactgtcccaaggcgaaaagttcacagaaactcagtctcctggaatcatggcattctgtataaagaatgctccaatgtccttgctttagttggtaaacggatctgtgtgctttcccttaatattgctttattacaagtgctcctaaggattgatattttgacatatagctaagttagattctaggcagtccttgatccaaccctgggattggcccccactccacccccacccccgccttactgaatccttttatatccaggacatagttagcaatgtttttcatatggaaactaccatatttatattagaacagaaagagaagacacactgaaagtaatatgaaagtttactgagaacaggaaatagctatctcttatggtggactcctcccacactgcgtactccataaagatgtaaaggccagctctctctttttcccttcctccctctctccacttatatctcttccttctgtctctttcccaaataaaaatcctcttcactgtattttataggaagcaggcttggatcccaacactttttccttagggcggaagaacccccgcactgctcagggctagttctttttccacaagcaccctgtagtaagaactcagatttccatcgtcccttgccagagagagcattgcagtggggagctttgctgacctgaccccccaggtactaaaagcaaagagtggctgtttaacattctgctataggtattctgaggtatttagattgctcccatactgaggctcctaaatctgtatgaggcacaaaaggttaatagtcacagcacattatggttctctaaggaactttacatgtgagtataagaaaagttccctagaaattcagccatgattacagagtctgtaacatttcagctgctgctgtaacccaggtgtcatccattaggaatctaggaagtgaggaaggcaaggcttgccttgtgtgaatagtattctacccagctggaggaagaggtggagctcagaggtaaattagcagggatgggaggaaatagggcatttctccgcggccctcagagagagagtgtggaagggcttacacgcttaggaagacatgtgtgaagctcggtatatatacaccgttttaatatcgttttcctgaagtcagtcttcatgtttgtatctacccgtgttgaattaaatgggacaatcacacagtttaccactgatctacacccatagcctttcaatagatactatcaaagggctcctaacaggatcccctgttcagttcagttagcatagacagaaaaactacagaataagcgtccacagtgttaacctgcttcacctacttggaagctgtacgaggccaggtacttaatttctctgcgccccttgttttctacaaaacaagactagtagcatctctgtaggggtgttctaaagataaaatgagttggtaggagccaagcacctagaccaggcaatagctacttaaaaccctgtcatatacataagagaacactttaaaacgtgtttaagagtgtgtattattcttccaaaggacctgaggtctattcccagcatccaaataaggctgttcacaacctcctgtaactctgtctgtggggattagacacttctggcttctttggtcacccacacatgttacatacacacgattaaaaataagtatttattaaataaatcagttaaactaagtctgtgcatcagtgtttttagacatacagcttgtgttttccatctctgagtctcttttgagatcctgtctccggaaaagttgacatcaattaaagtatccgcccccgctcccaaccccattttcttggaccctctcaaaacttgttacctggtccctgtgggaccattgggcccaagggcggaggcatttgcgttcagcctcttgggagttgtagtttccttaggttctggcgcatgctccaccgcaggctgggaactacaaaacccacaaatcctcgctgcaccgccctcctccgcctcgcgttcctcgcccgctcgcagccccgcccctcggtccaggcagaggcgcgatggccgaccgcggcggccctgctgaggcgcccagcccgcggggctctccccggccagagtcccgggccccgcgcacggtcgggccgggcgagaccccgcgtaccgcggcgctggcgctgcgcttcgataagcccatcaagcaggctttctacaacacgggcgccgtgctgttcgtgtgcctgtgctgcggcgccgcggtgctcgtgtacttcatcctcgaggccttcctgcggccgctgctctgggccgtgctgtgcggcactttcctgcacccgttcaagagctcgctcacgcgcctgggccgcctgtggctgcggcgcctgcaccgcgcgcacacgcccatcgtgctggccgcgctgctgctgccgctctgcttcgccgactacggcgtggaggcgctgggcgagcaggcgctgcgccgccgccgcctgttgctgctgctgggagcgggcggcccgctgctctatgggctctactgcctgggcagctacctgggcgtgcaggtgctgctggcgcacgcgggcgcgctcatctgccgcggcctcgactacttcagcagcctgtgggtgagtgagatgggggagtgcgtgcgaggttggcgggacccgggacgccgcgacaaggcggccaaaggtcctccagtgagcgccttcccacggccgagggacttggcgcgcttccttccagagaggcgggtgtgatttgaaacccgccctccgctagggaaaaggtcctttggctgagttcagttctttcaccctagtttgtgtgtgactctgggcgctttcgagaactgtattacttatgtgggggccattgcgacccggtctacgttagcaatggactgcgttaaaggagagagataccaggtgtcaatcgaggaacttcagaattggaaggaatcgcaaagataatcttagaggcgaattcctgactcagactacgtcgcaggctggttagttcacatatttatcgggcaaggttaaagtgaagtggttatttaatgcttaagaatcttaagaatgttggttggtaaactaccacaggggctaagaatgcaacgctggaatagcgagatcctagacagcgcgagatctagcgtgtatacaccccatactatttcacctttattcactttgttactgaaaaagtgaatatgccctgagattattaacgttacaaagtaattgcctttctttgctagagcaggtttaaacttgccaaaggtagattgctaattggtcccaggatcatgaggtcatctcttggttcttgtttaaagttgattgaagacattgtcaggtacttttcttcggggtgtataggagtacttttgcgggggtggtggtgctgggggtgtcatgtgtgctactgagttgtaccttcagcctcataaattagcatatcctaatggaacagacatacacagaggtaagtgtacacttctcacagttgtgggccacaggttcagttagtgtgaccgccttaaagatgaatagcttactgtcaaatctgtggctgtcaaatctgtttgtgctggggaccaaacccaagtgttagtgggcttgtgctgtagatactgagctgtagctccgctcctgttgtttactcttaagttaaatacaggggcccggaggttttccacttgctgctcttccagatgtcttgaattctgcccctagcccccatgttgcatcactgataagtctcctctacttccaacttcaagggccccagcaccctcttctgatttctccaagcacctgcatacacatgaatgtttcttacctatccttaaataaaaataataaaaataaatctttaaaaatagtttttaaaaaaggaagctaaaagcaactcaagttcacgcaaactcatacatctaataaattgttgaaattccaaaaaaaagtcagaaaaaaaaaaggaagctaaaatcagtgtccttttgttgttgaagaagtcagtttacgtggattaaattcctcgaataaaagaccattatgtgtgtataagaaaagtcctcaagaaattcagccatgattacagattctgtaacatttcagctgtcatccattcaggtgtcatccattgaatctaggaagtgaagaaggcaaggcttgccttgtgtgaatagtatcctttccagccagagtaagaggtggagctcagaggtaaattagtagggatgggaggaaatagggcatttctcctcggccctcagggagagagtggaagggcttacacacttaggaaaatacctgtgaagctcagtctatatacctgtttagtatcattttcctgaagtcagtcttcatgtttgtatctacccgtgttgaattaaatgtgacaatcacacagtttaccattgatctacaccatagcctttcaataaatactactaaaaggctcctaatacagtagtttggtcacagtgatgggagaaagggagatgaggagggagttataaagcacaacaagcccattataagagaccgttatgagtgaattagagcatgaggactaagctgagctgggtgcctgcaggttgagcttacctggcgacagacaactgtcagagttgagttctgccagtgccgataggggtcggacgtggatgaagtgaggcgtgttagcctgcacctgacactggttgaagctacatgtaaccgggcaggggcgtaccgtaagttttctatctccgaggccgcagcgtttggttttgtgagcccaagctgggctgcctaatgcaaagcatcggccctaatgctttatgacaacttgtgaatgtgagccagcatgacagaggcagagaggaaagtaccctgtaagcagacccacgttcacggggcagatgagtcatatgttcaaagatccagcttttgcatgtgtcctctgtgctaggcactgaactagcttctgacagggctacagctgcactgtggtatctatcagtcctgtccagcaggaggaagagacgtcagatctgaaaaactagagagcagtcaggtcatattctgaacctgttgctggcaggcaaagatctgctggcagtcagaactcctggtgcccttcaggaagggcaaagaacctttctccaagcacatgtgtttaaatcttcaacttaggaggaaaaacaaaactgatttcagttaaaaggaaaagtccagtgaacacaaaaattggactaatcccagctgttgccctggactcttagtagctcatgctgtctctgattctcctgccgtctgtgcaggtttccaggtcctggcgtttctgcttgcttttggtgcctctgttcactttggtttgttagcagtctgtcctcatgtcttcttcctgtacgcctcacttaagctcttttctttaccctggttccctcccaacactgcgccctggttccaggtgaaacgctaatccttcatggtaccagcagttctttttccacagtttcgggtgtgttggaatattgtcttcacctagtgatttcagaatcactaagaaaaatgtcttctgatgtcccatgctcggatttcccgggtaactttccctgtgatgtacaattgtgcaagataagtgtgaaaagttactagtgtcccctgcttcagcccttttctctgccaggaatattttgatcccctctttccttttgtttagacttgttcaggggaaaaagaccatttctagtttttgcagcagcaggtttgttttctccgtggccctgcctcctgtctctttctttatgaagaagtagtgttggaaacattgagggctgaaggatcagaggaccttccttgacttagaaacttcgctgtggcagtaacttgctttgtgacctgtgaccaaggcctcactctgggcccctcagctcccttgctgtgcaaattgaagggctggcttgaatgatgtctaagtccccttgagcttagttcagggccacaagagcctcttaggaagtgcaccctggccagccagcctctcagggagggctacacccttccacttggaaaccttgagaggtttgttgctgcttacctgacagcagctgagaggaagttctttcacaactagagacttagctataaaaactcctgactctgaaggaccagatgaccaagagaacagttttcagaatagctgtcttaaaggagaatgaagtacttggagtagttgctgctctagcagtgattggagagggcttgtttcttctgtctgagagagacttaggaagtggggcccgggagatggctcagccggtaaagtgcttgagagtctgagtttgaatccttagaatccaatagaagccgtggagtggtgatggagactggtggatcctggtggcttgctttccagccagtccaggcaaaatggtgagctccaggttgagagacttgcctcagaaaaggagaagggggaaaaagaaagaaaggaagaaaaaagatggagacatgagtaaggaagacatctcaaagtcagtctttgtctcacttgagtaggtgtgcctgcatgcacacatgcactttaacacactgagcacctcactgtgccatttcactgagaagtatgtcatgtgtgattgtgtctcctgaaaggaaaatatgagtgccttacttggagagctaactgaatgctgccaagttttatgccatcttatgtaatgtctagcacacgggtgctaaaagatggttggattatgtattttggagagagcacagcatgtttaagagaggataaatgttaggaagccttcaggtcagctgtggttcagagatttaaattcccacacaagcaggtgtgctcatgaggctgaatgtctgggctagggaggaaaaccctgttcttggtcatggtggctctgtaaacctagtgcttgggagaccaggacagaggattgtgaccttgaggacagttcacagtgaggtcctgtatccagacaaagcaacactcttaagggttggaaagccagctcggtgagagggtctctgctgagtttaatccccttcccttccaaacaaagcagagacatgcatgacacgtgatcacaaagcaagtataagtacttctcattgttttagaaaagcttaccatacttgttatgtaaagaacagtttaagcagcatagaaatttatatggtaaaagtaattatatatgtgtgtgtatatatatacatatacatatacatatatatataatatatatattatatatatatattatatatattatatatatacatatatataatatatatatattatatatatatatatatatatatatatatatatgataaccactatactacagaaagttttccctatcatacatatcctgtgtcacaataatgtatattaaaacatggagtcccatatacactgctctcatcaggcagttcctggcctcctgtagaccctttgctgttatggcttgcagctacagtttttctttttcatcttgttatggaatgaattcttttgtccaaaatgtcttttagaaaatgtttatgacaaatctttgtgtattccaacaaattcagagataaacacttttaactattggtaattaaattacccaaaaagccaagtgtttgtaaatggctctgtcttttgaacaaacagtagtatttctgtgagtctctctgaagaactacatgtaaatggttgtaaaactttgtaaggcccaaggaaggacatcttaaagggaaccccatttctttcctacttgggaaggagcatcccacagtgtgtaagcatgtggcacccctgagctccagctgcctgcagatggtgactttcattgtttttattgttgagtatatttttaccattatactttatatgcataaatttacactgtgctcctgaatatagtcgccacactcctccggttctgaatacatttgcatttttgaagctgtattgtaaacggcaactgaatactctgtatttatctgcacaccgtagtgttcatgtagcacagtcctgaaggtggaattagggggctatggaggagctgattgctttaacctgaaggaaggttatctgtgagcttcatgtttactggataaaaataacagttttcttcagatcaaaatttctcttaaaaaatctgaggtatataatttatttcttagcaacacaggtttccttgtgagtagagataacagcttctcagaatttgtctggatacacataaggaggtagatagaaacttactctgtttttagacagctattagttgctggaaacatttatactcattgtagtgaaatatgctaattcataatttccactatgtctgcatcagaactccagaaaactaagctactcgcctcttcccaggtgcttgtctcccccactctcctggctcttttgttagtcaacttgacaagctcgagttatctgggaagataagggaaccaagaaagtgcctctatccgactgcctgtagacaaagtctgtagacattttctttatatgatgtgagagggcccatcctactgtggctgttgccacccttagacaggtggtcctagggtatataagaaagcaaactgagcaagccagtaagtagccttccttcgaggcttcagttcctgtctccaggttcctgacttgagctcctgcctggactcctttccatgatagactccgatgtggaattgaaagcaaaacaaaccctttctccccccgctgcctgtagtcactgtgttctatcgcagcagtgatggccacctttcggcgtccagcgtctgagaacagctatcacaggctgctgctgctctctacttcttcataagctagagtccgcccacctcgtcatggctgtatcatgggacagtgttcctttgcttttttagcctgaattttattgcttacagtttgttggtgtctagttgcatttttataaacagacattctacattgactgctggagttaggtgctctctccagtccctgtttgtacattcgggttttggacctgaaggcacagctttgcccatcttggcattaaatgtaacaatcttccttgaatcagcacagcgtcctggccgtgggttggttaccttaggtctgtaggtgggcagcttgcctctgatcattctgtctcagttttgtgtaacctgtgggctttgctagtactttgccagagttttgtaaatttttttcacttaggactcctatttacctaagaaaatttcgtatgaccttagttatgtagctatataagacaggtttataatcaaacatttactgttaataaatcataactgtatttaattttattttttactttatatgtatgaatgttttgcctgtatgtatgtctgcgtaccacatgtgtgcagtgtttgtagagatagaagagggtgttagatcccctagaactggagttacagataattttgagcccctatgtgggtgctgggattagaacccagatcctctggaagagcagccagtgctcttaaccactgagccatatcttcagattaaagcagatttgtgtgctaatgagataagtgtgcttgggtgagtgtttaatcctgtaggcacagcatcttcagtattcttcagagttcattgctagtttgatttttataatcagtgctgagagtgttgctttgcttaagtaggtacatagtgcagaatggcaaggctatttttagtgccatttcaaaaactgctggaaattttctcataggctcgagtcgaaaagcacctgaggattttgtacttttttttttaagaaattggtcagtgccaggcagtggtggcggatgcctttaatcccagctcttgagagtcagaggcaggcagatttctgagttcaagaccagtatggtctacagagtaagttccaggtcagccagggctacacagagaaaccctgccccggaaacaaaccaaactaaacaaacaaacaacaaaaaaagaaattggtcagcacttcaaatagtttcaaaaatcaacaattctaagagtgcatgcagatagaatagttggtaccccacatgctgtggaatgctgaggaaattcctaaaatgttcttcttccatagcaggaagaggctttgtgtaagagctgtgagtgcaaagggggccctttaggtcagaaccaaggctttagtgaaatcacgtgactccactgcaggaagcacctccgacttctacgtatatgattttggattacattttcattgttgcatgttcagaacctatactactgacagacaattttcatgaccttcacattcctttatacctatgtcacagcccataggtttagaagctgggttctagtctggctgttgagtgaccaacaggatctgtgtggcatagggagaagtccagcccttccctcagggtcactattttaccactttgtaattactgaaatcgattgtatcttcattatgaaaaggactctatttcagactctacctttttttttccccctagcaccacttgtttctcctttactagggctgcagtgatggctcagtagttaagagcactggttgcacctgcagaggactggggtttgatcaccagcacccacgtggtaggtcacaactgtcacaaccttgacacggggtgctccagtgtcctcttctggcttctgagggaaccaggcacgcacttggtacacggacatatgtggaggctaaatatacccatacacacaaatacaaattgttatttgttagtgttctcgtgaagaaagagttatgtggatgtaggggccttggcagcttgtgatgatcgtttatctgtagtgataatcgttagtgataatccttcagctgtagggttgggaaatggaggaggaaccatggctggttctcttttcaacttttgctgtttcttcttgtaatatttttttcagataccctttttaactggtgcatatgactgtaggttagggtctcaacatctgtcacttagattatcaactggcttatactttagctagctcttctttgttttcaaaataactactttcctacttacattttataggctaaagtatgggctctttttagcctttttcttttttagggtccctaccttcatattagtcaacagaaacttctaggaattctacaagatcaactgtaatttaaatatggtacttacatataacttttatttttaaaaaaactagttaaatgggggaattagaacagttcccaaaccaaaaattgtatgagtgtttctggtaaaaataaagatctattttttttttaaaaaagttaaatggattttgaacttttgtatgtcttaaaacaatgtactttattaagtatataagtatcactgcctgggtttcaaatgcctatttaaacataactaaatgaaaaaggaagacccaggcaggccacccatagcatcctgtctgtgccgtgtccggaatacttacactatacagatgctgcagatattgtgtaacatatgctctttgttgtatatatgttacaactctgtcttatttatttaagatctggacattggtagttggctacgtgctgatggtttcattcaagtggaatgcaagcactcaacggtatttgagagcagtttcgattcctgtgtggatgatactgctttttcatataggtgagtcctttcttcttcttcaaaacagccgcccagtaactgtagtttaagaggctgatcagtggatgtgggtctttgtatgttgcactagagatgctttaacatattctgtagaaactgttgcgatttgagctttcgctaatcttcatccaagatactctgctttcagatgttgatctttaagttccctatgcattctttactaagttcttgacagtaagtgtgcagtgggtaaccttctagctcactttgcttgtggcaagcttggggaggagatggaaaagcacccaaggatgatgagaggcttgggccttgttgagtttgggtctgggtaagaaggaggtcttggggtaggaatgggggaggaggttagacaagaagagtgtatgaaatacaaaaacctcttcctaagaggtgttcatcctgtgaaagagtggcttaagcacttgtgtgtcacgagggagagatgccagagcttcagggagcagcgggaagaccgttgatggcttagcagagacggtgcacgccaaggctgctcagtcatgagtttcctgctcggtggggcagctcactgttagctggggccagagtgctgctgctgcatgctcttgaatggcttttcagcatgactcacatgactgggcaagacttgtaagactgagttgatagaactactaagttctactttaaaaagaaaatagttgagcaacttagagcagcagataacctaaagttgtttttagagtcgtttttataaattgtgttccccctctccccaaaggaagcagcagccaagcccagctgtctgtaaatgtcttgctcagggtctggctttgagaggtactgtctgcaggtttatggagttggaacgatgaggtttatctgcaaggtctcctgatgatgtatgtcagtcactcaggttatatttgcagaaggcagaagaggactcagggaaggcgggtgcttggggacttagctgtgtactgtgggagttctggatacagttttggggcctgttgggtcctttttgaaactcgagttctaacctagtgatatttcagagaaacaggctggttccctgacttcagggtttgtgtctacgactttgtttgtcgtggtgtcaggtgctgcataggggtgaacttgagtttggggtaatgtgaaacctgtgggtatgtgggggtgcatatgatggcctggagattgacctcttaagggtaggttggcacatgccttcatcctttgagagcaagggtgaaattgttctttcgttagagtctacctgtatgagggccttttaacaatgtttttccctgtgaaataatctcttaattttcctgtatatcaaattgttctattaactgaaaacatgacttcttactacttttcagcatcactggctggctcatggagaattccagtattcctggttattgttttcctgatgtctgtgggcaccctttatgaaaaacagaatgagaaggagtcggctggtaagacagtcttttatgagtgcgttcttagtgttttggaaggatagctgtctgtactgctgtgataaataccatgacaaaagtggcttggggggggggggggaagggtttatttcctcttctaactctcaagtcaaaggtcacactcattgcagcgaggtcagctcaggactgaagctgatccagaggccataaaggactagcttgttcttcatgacttgctcagcctgctttcctacagctcctatggcatctgcctagtgatggcaccctccacaaggatctgggccaccctacaccaataatcaatcaatcactctggtgagggaatgctctcaattgcggttctgtcttttcagatgattctactttatagaatttatcgagtaccttaccaaacaaagcacaataacttaaatgtcaaagagaaatcttttaatgtattaaaaacccgaagtggtttctaaacagaaaattaaattatctaaaatgttttaggcatctttagaccatgttcctattttgtatctttttgttattatggttaatataaaattggccatcaactattacacagtggcatttgtatttctcagtactgtgtacccgccacctccatctagttttacagtgtttatcactctgaaaggaaaacctgtacacctttcagtattgtactgtttttaatggctgagtaatattccagcacacagctcttccacattctgtctgtcatcctttcacagatgtaggttgtcttcatcttttgggtcttgtgaatagtgctggtatgaagcatttatgtacaggaagctgtttattcatttaaaatttcagtttcctgttgtggcctgtcttcctgtcaaggtgcttgaaccccagagcctgtgtggaagacttagagtggtacaggggctggtagcttccattagttctgcttgggtttaccttgttcctttccctaagtgtcagggactcaaacannnnnnnnnnnnnnnnnnnnnnnnnnnnnnnnnnnnnnnnnnnnnnnnnnnnnnnnnnnnnnnnnnnnnnnnnnnnnnnnnnnnnnnnnnnnnnnnnnnnnnnnnnnnnnnnnnnnnnnnnnnnnnnnnnnnnnnnnnnnnnnnnnnnnnnnnnnnnnnnnnnnnnnnnnnnnnnnnnnnnnnnnnnnnnnnnnnnnnnnnnnnnnnnnnnnnnnnnnnnnnnnnnnnnnnnnnnnnnnnnnnnnnnnnnnnnnnnnnnnnnnnnnnnnnnnnnnnnnnnnnnnnnnnnnnnnnnnnnnnnnnnnnnnnnnnnnnnnnnnnnnnnnnnnnnnnnnnnnnnnnnnnnnnnnnnnnnnnnnnnnnnnnnnnnnnnnnnnnnnnnnnnnnnnnnnnnnnnnnnnnnnnnnnnnnnnnnnnnnnnnnnnnnnnnnnnnnnnnnnnnnnnnnnnnnnnnnnnnnnnnnnnnnnnnnnnnnnnnnnnnnnnnnnnnnnnnnnnnnnnnnnnnnnnnnnnnnnnnnnnnnnnnnnnnnnnnnnnnnnnnnnnnnnnnnnnnnnnnnnnnnnnnnnnnnnnnnnnnnnnnnnnnnnnnnnnnnnnnnnnnnnnnnnncagctgctttgttatagggtaagtctgggtagccttatctttttattgaattcttgtctgtggattcaaccatctgaaaatggaaagtattttgggaacatgacagctatattgagcatgtaaagaccttttcttgtcatttttgcatatacagtgcagcattacaactatcacgtggcattttaatgttagatattctacataatctagggaagatttaaaatgtatgtgaggatgtgcttaggccaagtgcagacactgtctttttttaagggacttgatgtatacaagaggtcagcacctggtccctgtgatactgagggcttcctgtatataagtagcacagatctacacccaagggcttcaggcccctccctgcccaggtatacattctagtcgcccagttaacagcccttcaagagctctgagaagaataatttaggaccaggttttgagtcatgggtgggggttaaagagatgctgaggtctactattgccaggcatcaacccagacaagggtgttgatatgccagcctgttttctgaagcctgggttattgactttcaaggaaagatgtcctagagtctgagaataagtgcagagaacagcctggaagcaacgattttcctgttttgttttgttctttcctgcttcaaagctggttactgttgaccttaggacaacagtgcttttctagaggcctaaatatttcttcctcatgttcctaacatcttacttctctttaaatcagatgagaaaccatctagtctttaagagagcagacctccctcgtgttccttttcttcctgcagttgatgctttcatgtggtacaggaatgcttcagtgagctgcctcagcaggaccggttctgagccttgcctgctcttgaacttgtgtggcgtcacctgagtgaatggcctgctttgcatcatctgggctgtcttagctctgtgagccacaactagctttcgtttgtagaagtaaggtgctggatttcattagaattcaaagtctaagtttgtttgattcctggactcaacagttcactctaaatttaggggcttgacccttggaccttgggaactcttgggtggtatttcctggaactttaattcacttaggggaaaaatgtgttcaaggttctcctattgaataagaactttttgggatactttaaaattttatttttattattatgtgtataggtatgcctacacacacacacactcactgtgcatgcagtgcccaaggaggccagaagaggcatcagatcctcaaaactgtagttagagatggagctgcaattcgggtgctgtgaattgaacccaggtcttctggaagagcagccagtgctcttagtcaccgagccatggctttagctttatgaggtactttcaaatggactgtctttagaaatccaccatcaacaacagcaaacaagcaaaacacaaaccaaaacaaatgaaatggaattgatggtacctccatctgctgatgaaggtgtttcatttctggggttctgaggcacctccagtcacatgggtggagctatgatttaagccaaggtccgtgaccttcattcagccccttgttcttttcctttccttgccacattgagtgatcaggaattatccatagtgaaagtatcaacactgctgtcttggctcggctcagttgtagctgtcattacctttcttactctgttagcccagttggctcatcacttctctgtccactggatgctgtccactaggtagagacctctgtcctagtttatcttctgtgctagactcctccttgtcgtttgcacaggctggctgatgcagtgaggtgccaacagtgttctgaagggttggtgtgtgaatcagggtgtccacatctggtggcccaccttctcattgcagcctcacgtggcacccttaatattattacagtgcaccatgagctttggatggggcaaacattcaaacaccacccctggaaaaaagtgacagtgcgttcccttggcctatagagaaaataccagcattactttcaccaatgatgaaccttggtgatgttaacatgccatcctatttttttaaattaatttgtttattttatactccatattttattcacccacccaccccctgtctccatgtggatgtccccaccctcaatgccacttgacctctacactccctggggcctccagtctcttgagggttaggtgcatcatctctgaacacagacagggcagtcctctgctgtatgtgttggtggcctcatagcagctggtgtatgctgcgtggttggtgatccagtgtctgagagatcttgggggtccatcctatttttttaagcaatccagtgagactcatttttttgtgtatgttggatatttggattcagagatttgttctgagtatgagatgagtcttttcaaaagtgagaagtggctcattggttatgagcacacactgttctttcagaggaccagagttcagttcccaacacccatgtcaggtggctcacagttgcctataactccatggttggttccatggaacccaacgtttatcttctggtctccgggaatctgcacacagttgttggtttgcataccagagcacagccagcaggctgatccgggaaggaaggcagaacataatctgaggacccctagtcaggccagaacaaaagctccgaggggtgctggcctggctggaacagccagaatgttagaactgtccttggggaagctagggtagagcaggctgctggagaccttttctgatgcagtcgcaaccctggagttagtggctcgcagtggtatgcaggagctggctggtagaagctgaagttgctgagtgtcaggatgtggctgtgattaatcgtgaatggggttagatagctgcggtgttgaaagcttgatcggggcctgctgggtggggctgaggtctagcagaaaaagcttgagagaaaactcttccctagagtgttacagctctattaaataggtgctcgcagatgattcttggtgaaataactggagcactttattccttgtagagaagggaccttatagacattttggggtggggtgggatctaggggtaaatgcttctcattggctcagtctgagatgttagggatgctctgtttacatgggaaaagactttagtggggtgttgtggtcacgtggtctgagacatggagaccctggccaggagttggttctaagacctacctttctcaattatgaaaattcccagggattttgaacctgcttcaaccttgcgggatcttctgtctgggggcacggcccactgcccacacagataccctctctctaccccacaactaaaatggaaagaacaaaaaaggggctagagggatggctcagcacttcagagctttggctactgagttctatttccagcaccaaccatctgttgcagatcagaactgtgggcactgcaggcacgtggaacaaagacatacatccagctgtaacaccaacaaatagaaaataaagtgaagggaaaataataaaatctttttttttaaatcaggaaaaccaggcttctgatgtgtctctaatccaagatggttagcctggagcagtagtgtggcccacctggtagctgttcagctagttagtaaccgttagaagtatctttgctagccagaaggtaggcgcatgcttttaatcccagcacttggaaggcagaggtaggcagatctctttgagtttaaggccagcctggtctacagagtgagttccaggacagatatgcttatatttgtttgtttttttgagactatatctcaatgtgtagtcctggctagcctggaactcttagagacctaggaatactagaattaaagtcatgcaatcagggctatatagtgagaccctgtctcaaaacaacaacaacaaaacccccccaaaaaaaaaccacacaagaaagaacttggcgggggtgggggggggcaggaaaaaagaaagaaagaaacccacttttgcaggaagctctggggagagcacatgctatgaaagaacaagctggtccagtgaagcccacgtagaaagaagaggaacaaagccaagtgtccatctcctgctctgcagttactacagctacccttagagcctagagcaactgcgtttatatccaggccctgtgcactagaagctgttgagaggaaggtgtgaagggaagcagccttcattgctcactgtgggctagcaagcattcctgtgtacagtacaggtgtcagtagcaggtattttcggtttctcgtcattactctgggaacacagcagatgaagaagtagcttcctatttatactcatatcagcatgtgctttcccatcaacactggggaattaatctgctaatggtagacttatattaactccaactttgtgtcttgtctgtggccttctttggacttagacagtgcccccatactgaccctgaccctgaccctgtgcagactgctacctgaaaccttgggtgttctccacgccaccccccactcccagtccttgagctcaagatcatgtacccgtgtttatatgtctatttttagctgcattgtaaatctagtaccatgaccttacctagaatctcattcttggctttcacatgtccagaccttggggtttttgaagtgcagaaacataacatgtagatagagcttattaaaatgtgtatccgcttggtaagtcaccagggcttgggtccataaagttcaagtaccttttgttaatgttctctgcgtgctgctcctttgactcttttgaagtgtgaggctctaatcactcacagtcacagaatgcctagttgtcactgaatatgtactacatattttactgacactagaaaagtgaatagtctttatgctgtaattttgatgatttaacttgctggttttaattttcagacctttaagtgtgcagaatgttgcgtaaccctgagagaagatacaaacgtgcctgctagggagagagtgacttagggcataactgtactactagctgaaggatgggagctacagagaaatactgtagacactagtggcttatgcttacagttcgtgttgtccaccacagtactttgttgttgataaccactagggagctctcggcaaaccttctgaatgtcaggaagcagtcaggccttcgatgtgtgtcttctcacccagtcacatccaaattggaaattaggtggagctcattttgcggatgaggagactgggctcatcctactgccacccacatattaagaacatactaagtagggccttcctccatgtatagaagctgtggcttcccattttgatctccattccatctcccagacacctgtgcactcctctcctaaacctgtgttcggccacattggactgcttgtaaccctttgaagaggacactgcttttctttgtgacttctttgcttcttttttctttttttgtcttggaacatgtttctactgctcctatttaagctccaattcctccttcttaccccaagatagacttgttctgtttctttatgtggctggtgtttgagttaaagaatacatgatctatgactcataaacgagaagacctttggaaactgtcccctgagctcctgttatggattaggcttctgtcctttgtgcacctcaaaccttctgcactatttggtattaattcttaacatattgattgtaactgttagttttagctttacattgaatgtgaggttaaagtcctggtcgcttatgttattcctcttagatgagtaaatttaaaattcatcatggaagttgctttttagggtgtttcaagtgagtctccttcttataattaaattgcctatgcagaagtctgttggttcagggccactgactgctgcttactgcagaggagagagtacttactgcctgccctattttatttacattttgacaggaagttgtcccccacccttttactgttcaaggtatcctcactgtgattttgtttggggccttctactgggcacactcctgagaatctagtcctgtcctgtctctgctgcagatggtttgtgaaactacttctttctacaagtatcttcacgccagccccttaccattccctgtaggataatctggaggggttggcacgtttagctgtgatctgtcagtttatcatggggttctttggaatccagccactttacacacactggagatcacatccaggtttcctctctccagtccttctccagaatagcaagattgatttaagtatctcttagaactggtcacttagttcccaggcaggcggccactgtgtggattctgaaagggcagtggcgaggatgcttgtagcaaggacactgttgtatggcttatgtcctactgctggcctgactagactgctgttgctattgtgagaaactgagtagaacgcacacagggtcacttcttagcgctacacacaagtctgtatctatatattgcactatgtttccatagggagggacggagattgctccctgtttacagtgccagcgcatttctgttcctctttgggtaaagactaaagctgacagtatgatctctgcgtaatgtcatttggctttctggttatagctctgtttgtttgatcccagtgtccccctggcatctgcgctctccgtgcaccggccttcttttgctgttgtttgcatgtccgcttctctccatggccttccaactagcttccttctagcctaaggttatttttggtatttgttttattccctctcctctattacaatatcaattatattttcatttttaaagaaaactctttctttgggcctggagaaataacttagaggctaagagcaacttgctgctgaaaccatctgggactcgttccagggggtctgctctctcaggtctctgtgggcactgcacacatgtgatagacagacatattgcagcctaagcacctatagacaacaaataataaacctttaaagacagagcccttctcttattttccagttatgtcagatttcttgtcttaagagctagtgaaacacctactccatgtagggcagctgtagtttgtcacttgcggttatgggttttggttttgttttaaatccaggtatgtctcttcactacactctgggaatggggtttttgtctttatcccccaacacatatactagtaagcaatgaggacatgtcagacataaaaggtacttgttctctccctcagctgatgcttgccttttgctatagttaaaggacttgagtgtgtaggccaggagactgcggtcccagcacagacatgcagcttatgtcttctttctggactgtgagtgagattttctccccgagtgccttaaaacaagcttcttccatatggcatttactgaagcatggaataggacatgattaagctggtaactttgcattttaatggctaaattgatcaaagagccactcctgcttcttatctcaagtagatggccaatctttaatttgtttgatatatgggattaattggagctaataattctttgacttactgaagggtaatgttttattttccatgattggcagacttctcatttgtcagtctttccagaagtaagatcctgcctgtgagtggctgtggcttgattagaatggcctttggccttaagtttagaatctactgcagctggtatgagtagcaggtactgagtagcatctgggaattgtgtgtgtgtatttttacaaagctaataaacatctactgttgaccctggcatagatggaaacagtgtagtcagaagtgctcattaactacaggaatgttttggacagaaggccatggctgctgctgcttgccattaacttagaattcggccttcagaaactctagaactttgactaagttgctgcagataaaccataggactgcggagtacttgctgtgggagctgtgtggcctccaaacggcagtgtgtcattctgttacccatcttgcacatgcatacttgcttgttggaaactgcttttgcacatgacactttggggagtattgataaatgatctctaaggtgtaagaaagctagaacccgatgctgtgtgagctagtctgctcagtctgccgtagcctgtcaagagactgacccccgaagacacacctcacttgccggtagatgcttcatttgaatccagggcagatgagagtttggtattatccagcaggaaatttacagtgaaccaaataatgatgttcttttagatttcccactggtggatattctctttgttgatgtttttatactttgtagatctgtttttgtacaatatccatatatttgcatgttcatttacgtaatgttattactgtgaacaataaatgtggcctttcccatactgtattagaacctatgaacacaaaatagtataagacagttaaatcagcgagctctcagactctatgcaatgttttccagtggaaatgtgaattaaagtcatctggtaaagttaaagaaaaaaaaaagcccagcattttgaattaatttgcttgggtgcagtatctggctgcttaccgcatggggctctcacatgaagacagaatgtccggaacaagcagctgatgattttgaggtgttcttccttggtaaagacccacagtgcctgagaaatcactatcttaaccattatggtttgttctactgaaaacagttttggtttaagtaggcaggggttagttcctgtttatttgcttaaaggattttcatgctgtgtttcttctccccttctgaccctttacaggggcagaattaccaggacaagtgatctccatggcagcttctactcttgcaaacttggccatctccatcactgggtatgagtccagcactgaagaccagccctctgaccctccgacaggtgactgacatgaaagccatgacaggacacagggaggggacagagtggagaccaggcttgccgctcctccctgattctcatcctgactgctctcttacaccacagtcctcatgtattcgtcttacatttccagttgctttcctcttgggtttcctgtcccggccccttcccttgcttctgttttaaacatgcccttctgatgcttcttaccctgttttcttgcctcagtcccatttaccacccatggttctacccagctctgtgctctccttatcttggttttttattttctcttccttttctagcagccagttctacattattctgtttttgatgctttttattcccttccaaactctctatctgtaggtggatatttttcttttcctcattttctacattttttttttctcctggaatttttttctctttaagtaaaagtaccacttgaatgccttatgctgtatgtatatgtaatatataggagctatgtggagaagtaggaacacacgctttccttatacacgaaaccatgtttccagaggggagcaggacgatccctaggttatggagttagtgttctggcatctgtcattcccactgacctagaattttcagatccgacgagcagagcaaggacaaacaaaagcatgttatcatttgcttcacttttagccttgacccacgtgcacagatgcatgtaggcaaagcagccatataaataaagatgaatctcaaaaaatacttaactcgtatacaggaaaaggtagaatatttgttgtctcccagaatcctgattttcctagaccaggaccctgatggcaggtttgtttcagtgcagatcttctgtctctttaacccgatgcgatcctgctgtacttccagtgtagtatattttgtattgttgttttctcgtgtgaactaaaacaatgtgtgactttctgtctttgccttttttagagcccacagacaagggagaaccccctccagcattgtctgcttcttcttcatcctcctctcgttcctcaccctcttctccttcacctactttgggcagacagaggcccgagatgggaacatttctcaggaagaagaaaacgagtgacatctacttcgtgtctcttgtgtgggccatcattgctgtccagctttggctgaatctgtggatcgtacagctgctgccagtgcctgttgcaggttgttatttgcttaagtgtggatttaccttcacagactttttctccttttttaaacaatgggatttgcatatttgatacagttttgttgccatcttaaaatagttgtatgtttgtgtttaggtcataagaaaaacatttattttatgtgtatgggtgttggcatacatatgcgtgcccaccgaggccgaaaaagggtactaggtcctgtggaacttgagtttcagacagttaccagccacagagtgttccaggacatccagggatatatggagagaccctgtctcaaagacaaacaaaacaaaatctaatgaaggaatttttgaacttttatatcatcctattttagttaacttttctattggtgtgacaaagcaccaaggcttcttataaaagaaggcattaattagaggctcactgttcatgtccgtcctggtgggtagcatggcagcaggcaggcagtcatggagcctgagtagtagccgagaacttagatgttgatagaacagctatgaacgggcagagaagggtagagaaggtacagacacacaggcatgcacgcattcagggaatggctcttcaaacctcagagcctcctgcctagtctacttctccaacaaggccacatctccttatctttcccaaactgttccaccagttgagtagtcagatatatgagcctgtggtaatccattcttttcttgctttctggttttgttttgtttcaaggcaggacttctctgtatagctagccctggctgtcctgaaattcattatgtagatcaggctagccttgaatatatggagattccccctgcctctgcctcctgaattctgggattaaaggccaccacccagcaagcctgtgggaaccattcttacacaaaccaccatactgacacgcagcttataaagttggattaagaatattggtcccaggagttaaagaagctttattggaaagaaatcattacataggcccaccttcattaataaagtagcctgtcttcctagttggctttaacagctgattttctgctgacctctgacctctgttcagagcaccatcaggtgagcaaacaggagcacagttggaaatactgcctgctgtggtacaaagccactgggaagcagctatgatggccaaggaaatcagtaaatgttggggctcagttttccttaattaggaagagggaagctgtgaaggccattgtagtccatgatgtttgtaggctggacagtgagccctgcctgactcatcccgggattcagcttcacagaggtgatgctcagctggtggggcttccttggaagtgtggctggccagtttcttctcaagtacctgtggtccttcctgctccctctgccatgatcttggtttagtcctggctttactgtttagaatggaaggtagggaacttacattctgcctttcaaatctgtttcctttgtgtttgtatcttctttatagtctggatcatcaaaaagctcgtgatccactttggagtggtgggcttcctggagaaacgctgccgcgcatggtggcaggtgattgagtgcttcctgaaggagcggcaggaggctttggcaccttggccgattatcgggcttggaaagttcttactaaaagttgatagcaaggtatgattgggctgctccaatggggtctttgtgttccgtgacttgaacagtccatttcataacattgataatgtgcttcgtatctgattctccatgaaaatttaaggcttagaattatagagtggatttagatgaaataaaattgtggtcatttttcttataaaggagagaaggttaggtaatggggggtggtggnnnnnnnnnnnnnnnnnnnnnnnnnnnnnnnnnnnnnnnnnnnnnnnnnnnnnnnnnnnnnnnnnnnnnnnnnnnnnnnnnnnnnnnnnnnnnnnnnnnnnnnnnnnnnnnnnnnnnnnnnnnnnnnnnnnnnnnnnnnnnnnnnnnnnnnnnnnnnnnnnnnnnnnnnnnnnnnnnnnnnnnnnccccccccccccccccccccccgagaccagaagcacagctttaatgccaagaaattgctaatttctgagaacttagtggttaaaagacatggaatctaaatccacactctttcaggtcccacatctgttatttaccagccctgtaaccttggacagatggcttaacttctctgtgccttggtttcactatcaataaagtgggtataatagcacttatctcaaaatgtgattttttgagtgctagctgtctctcagtttttacagagaagtgtctgcctgacacagtaggagcagtgagtgaaaaatgtctctgtagccctagtggcaggaaagggacgctttggggagatgtaagcagagtcccgagcacaagcagttaggtggacctgcctgtgcagggctctgcactggagaggatccatctggactgcggatttcgagttccaagttccggtacagctacggtacagcatgtagtggggcagtcgctccgccatcctgatcctatagcagcattctgtgaaagctctgtaactcgctgtctcctgctgagctcctcctgctctcagtgactctgctattggtgcattcattctctaatgatatcccactcttcttatcttctctcacctccctgtcttccagctctggcactggctaaataagaaggtaataaacgtgtgggtgtgattgtcactgccccaacccatcactatctcctttctcattctgtgtttccgtgcatacattaaactaagatttgttttcaaaactttaagctatggaaggtcgcgaaatatgaatgctgtcctagtcatttactgaaacccccaccaagctcctagggtatgaatgggtcccttgtcaggtatttaagaggttatatcttgtagcccttctgtccagaaaatgggttttcttgtttttctctagtgtggcaactctggtctctctctctctcattctttgagtcagggtcttggtgtgtagtccagctgccttctatcctcctgcctcagtctcttgagtgccaggtttacaggcatctactaccaactttcggttcctttgtgtgtgaaacacgttaagctatagagagaggaaagaaagtctttattcctagtttttctataagtgacacaagaagttttaaaaattgacaaacctgtaaaacacttgttgaatttatcttatttcttggttagtaatttttttggtctttttttttttttttttaattgtcttagcttggacttctgttgctgtggtaacacaacttggggaggaaagggtttctttcatcttacatgtctcagtaacagtccatcctgaagagaatcaaggtaggaactgaagcagacatcatggaggaaaatactgcttaccggtttgctccttctagcctgctcagcctgcctctttatataactcaggaccacctgaaggatggcaccacccagagtgggttggacctacgtcagtcaccagtcatgaaaatgctccacaaggttgcctacaaaccagtctttttttgttttgttttgttttttgtttttttcgagacagggtttctctgtatagccctggctatcctggaactcactctgtagaccaggctggcctcgaactcagaaatccgcctgcctctgcctcccgagtgctgggattaaaggcgtgcgccaccaccgtccagcttacaaaccagtcttgtagggacattttctcaactgaggttccctcttctcaaatgactctagtttgtgtcaacgtgacagaaattaactaggactcctgtatcccagaaacagttatttatttagttttcatggcctgcaaatttgtgtttcatgagtcatgaatgaagtttgtctgtaggaactttttcttgattggcattggattgtaaaaagcagatttcatataaattcttaaggccaagctatatgtatgaagaatgctgtgcctttgacatttagtcaaagtagagcagcgtttggctctcagatccttaggacaggtgtgccagaggtggcattgtatgtgtcctgtttaaacacaagcatgactcgggtgtgataaaaattgtgtaataaaccttaaagatgtggatgtaggccacagtcacatatttctattttcagtttttatttacttatttgtatttgctaatttagtcattatttttgtggtgctgaaggtcaaattcaggccatgagcatggcagactgtcatacactgctagatccagatatgacatttaaatatggagataagaatttactcctccctccctggtgaaatggagacatgggagatgacatcacttaagattttaaactggattgcaagcaagcaatgtgtaaaatatatggtctactcccacatgtatgtggttgtatatgccctgattcctcataaactactgtcaggacatgagtgtatttattagtctgtcatcaatttatgtatgtatgtatgtctctatcatctatatctgtctacctacttacctatttacctatctatatgtagatatctagatagagtgtgtgtgtgtgtgtgtgtgtgtgtgtgtgtgtgtgtaggtgtgtgtagagagggaggaggagagacattgtataacatacatttttttaactttaatcaaagtaaagtggttctgtttccccagttggtgtgtattgaaatgaattgtcctcaagataaagaagaattaaattcattaagtttaatatatctacctcagtgggctaaatgaattaggaaacctaatttatgagcctaatgtatagctgaaaagcagaggtagtgttaaaagattcctacgagatcaagtcactgtagtgtgttcaaagcattgatgtgtagttggggtgcagctgcctgcatttctgtttgtgttctagagaagtgcataaggaattatgatacttaatagcttgatatgcaaagccagttggcttagaagttttagagtagggcttagtgtaattaagttttaaaaatatatcctcttttcatatttgaaatatttaacacatcattttaaaacagtttccttttaagaacaaaaccttaaaggttattaattggtcaaggcctgaaaagactgaagaaattcctagagaccgtagagaccgtgtgtgttccacagcccagcagtgtggttagagttttgttgcctttgctcactatgagcatgggcaaggaagatctgcctccttggaaagaaagcatctggcactccagggagtctcagctttctctgtccatgtctctcttttgctcacctcctctgtccatgtctctctccttcactcacctcctctgtccacgtctctcttttgctcacctcctctgtccatgtctctctccttcactcacctcctctgtccacgtctctcttttgctcacctcctctgtccatgtctctctccttcactcacctcctctgtccatgtctctctccttcattcacctcctctgtccacatctttcttttgctcacctcctctgtccacgtctctctctttcactcacctcctctgtccatgtctctctccttcactcacctcctctgtccacgtctctctctttcactcacctcctctgtccacgtctctctctttcactcacctcctctgtccacgtctctctctttcactcacctcctctgtccacgtctctctctttcactcacctcctctgtccatgtctctctccttcactcacctcctctgtccacgtctctctctttcactcacctcctctgtccacgtctctctctttcactcacctcctctgtccacgtctctctctttcactcacctcctctgtccacgtctctcttgctctctttcattcacactcaccagttgctgctgctttttcttcattcaactttactggcctattgtttgtttaagtgtgtgtgagtgttttgccttcattactttgtatgtgtatatatgtatgtatgatgtatatgtgtgtgtgtgtgtgtgtgtgtgtgtgtgtgtgtgtgtgtgtgttatgcacatgtatgtatgatgctgccggaagagtgcattggattctctggaactagttaaagacagtggagctaccatgtggtgctgggactgtgcaggagctcaccctgcagtatgcagcaggttggaaagaactggagcctctgaagtcttaagcttaatttctgacaaaattggagttaggaagattccactctacttaaaactatgaaggcttgagtttggaactgtgctggggctctatggaatctcatggtttgtatgttaatgccacctcataggaggttagggctccatgcttttcagaagattatttttatttaaaaccatgcttttaaggatgtttcttttaatacttttgcaaactgttactcatggaaacaaatctggttgtaactctgaaataagcttagtattgatgatataatccatactcctggtttacagagctttggagaggaaggagtgaggtagccctttgctcagggagctaccccgggaaccctagggcccagctgcttcctgatgcaaaacttgtcagttcattgattttagaacttatcttcgagtaagacacctgaccttccataccttagaaccccgttgttgtttgtttttgtcttgtttaatccctgcgttgtctgatgctttggtagcatgcactggagcttaagtcttgctttgaagctcttgagtgtcaacatcctagattaactttttgtgtctgagctcactgtggcgctaagtggaggacggtggacttcatggaagaattgttgcttttagtaaatttactcactgcatagtgagcatagttttaatttaaattagaagaacttagccatatatagctcgtgcttgggttgatgggcacagtatggcacgttagcattattgatctaattaagtttaattttgaatgttaaatggtggctttgcatggcagaaagtgtagaagttatcattgttacatattctaaaaccaaaatgtgtttaagatgtaggattgttggagttgtaaaaaataagaaatgttctagtaaagacagaatatcaaataacattttaaggaaagcataaatctgattattaaggaacagctactgtgttgaggattaatatgcttcattgagttagaatcgtgtcacagatcttatggtttcaatagaatagactagaagcttctagtgggatagcaggacttttgaaagcattttattatgaagtatctaaaatctaaaagccctggggctggtagcacctgcttgcttacttactagcaggtgagggcacctttggccccgtgtagtgacttgagttcagtctgtgtaagccacatggtgcgaggagagggcccacccttcagagtgtcctctgaccccatactcacactgtgtgtacccccagatacataaacacttatacttagcttttttaaaatttaaaagcccttacaaatattaaaatttaaaaccaaaacaaataaaaaaaaacacaacgattcacctacccactgtccacctcagtagaaccacatccacttcccaaggtctgggacctgggagccggcagtctgaatttgctgttattactgccttaacattacatacatcagcaattaccatctttaggaccctaatggagtgaaaggagactgcacctggaatgtaattgctgtctgtctttgctcctgttttctgtataatttaagagatgagtgttacaaggagcatacacaagccttctgtgttggctaactgataagacagcttcatgaaatgagttcaactgatgaaggagtgtcataattttgtttggaatgtatttgccaggcctcatgaattagagattgaaatgtgaatgtagcataaggagaatccaggagtacacatggatcgtgttctggctgactttcttctcatagccatgacaataatgaactctgcacataacagcagcaattaatacttaacttcttaaggttgcttatagcttttattgctttaatcggtatgctatagtttgctttgcaatgttggatatcctgtatttgtgatatttgaatacatacgtgtgtttgttaagtgatatgttgaagataagtaaccctcctttttcattcccatgcagatgatcatctggttggagaagatgttagataaaattattagcattttcatcatattcttgctagtcataggaacccttcttttggcccttctcctgactgcaaaggtaaggtacattaaccagtattcttgttagacaaagtccttgttagagtgcatatgcagaagaagctagcagaagcaaatgggaaatagcatttggcttatcagaagtacctctgctcactaaagtatatatccattttgtacattagtaatttttctgttagtctgcctagaatgttttctttttaaatctcatttatgtacattttgttttgtcatcaagtcttaagcagagagtgcagtttaaaaaaaaaggatcctaaaaataatttccacccccagccatagacttaagaggtttctgaattagtctcatgactccttaatgtagttagtgcagtgtgcccttctttcttttctcccggggttctggtcttgatgtcttctgctggcgctgcaggcactggcctcaagctcctgggttcaggtggctctccttcgcagtcttctgagcacctccatggacaggtgcgcctgtgcaccgactgtcacggtttctgcgttagctccttccttcctgccactagtcttcctgtgcagtgtgtaagtctgctgcagtcccacggacctgcttttgtccttgttgcttgtgcttttggtgtctgttttaaaacgctatcctctgggcacggtatggccattgctgtccctacatcaggacccagaggagactctgagaaggctttgaccactggccttccctcatgaagggagggaggctcacagggcacacagggcagctcgcgtaaggtcttcatttcttacttttcagattcagctgtagggttgtttcctgtttatgtcctcaagaaacacagctgcattttctcctgcgctgagggcttttctgagggtaattttctacactttcagtgcgttcttgtccctatttatcgaactctgtttgactccacttccagattttagtgttctgttttcagaggatggtgaagcttacgtgaaatcatggctatcaaaacttctctagctcttgcaatgattcgttagtaactgttggcagtagatgataaagggcagcagttgctacggaattgaattgcgcttatgagcggtcaccactcggaagtcctgttcttcagtcaggctcgttacagtcgatttgctttctcccctgcagctgactccattagcacttctgtctgtctgtctgtctgtctcatggctgttcctgtatgttctttaggtagtggtcacacagagatgagccctctgtgagtttttaccatgtttgacctgcggtcagtacttttgcctgttggctctttcccttctttgtccctttattgttctgtttctttgcacaggacttctgtctgcctgcctcagttgtgctcacctgtcaggctctttatttgttccatgatgcattgagttttgcttccctcagcttaatttgtgggtattgaaccatttctttcttgtgtgggatttaagtggactaaacatttgagggagccctgttgggtatctggctcccccccaccccaccccagtaaaggtattgttttctggaataccaagacagcgtctacttgagcatctaataggtacctcaatgtaacatcagaaactgttctcctcacagtccttctgttccagtaagtgacagctccactctcctgtgcagtgaggagcttcagtgtcagccttgaatacacctttgccacacatttacttcctcagaaagtcctttgacaatagcaggctgaggttgtcacataacttcctctccacagaaaacaggaataaaactgtcaagttcagaccagtgccacttaaagccattgcaaaatgaccagctaggtaagtcctagagtcatgttagcttcaagttattctgcagcaaaactctgcagctttctctgaggaattgttgtttgcatgttcggtgcagtctcttgtctgctttgtctgtgtagcttgtgtggttggtgtctgttgtggaatgccatccttcagttctgttctgatatcaggctaccaggctaacagggcagctcttcagaggcacttggagctcttcttcctgagaatatggaagaagttgatggctgaggtggggatgtgacttttagtgtcaccgccatagttgcctttacagtcgcccgtgcccttgtaggtaatccctcacccacttgtctgagcaattccagttgaacttgccggaaccagttaattccagttaaacttgccagttccctaaaccatacttgagcagcagcatttgtttcttctgtctgttgccagtgtggagggtttaaatgtttgtctacatctttccagaagaagttaacggaattacagttgtaaaataatggcaaagtctagttggaggtgagcagagcctcagagatgcatgccaagcttctagtagcatgcggttggcgtgccgagagctgagagggaaaggcaggaaaagtatagcccaaagatgtcagcaaactccagagtcaacacagacacacccataccgcagcacactccagggaagctgcggacagccatcgataaagaggaacatcgataaaggaggtaactacagcactaagggaacaaaacaatcataggaaaagacaaagagatgaagttttaaagctgaaaaacaagaagcctgactgacaaccaagaattttatgtttaatggctctgttcttaaaaataaagattaaagaactggaagtatggcagtgttgtccaagacactagcttcagtttccacttgattctctttcccccttcaaaaagtaaaggcaaaataaaaccattccagataagttacagcagacagaattaattgatggcagatgtgttctgtaaggaaagctaaaataatgtagtaggccacaccagtcacccagccagagctacatagccagaccttagcttttttttttcctccagaatctataggaaagctgagtggccgctgcaggccctgtgctgacctgggctgccagtctctccattgctctggcaggcgcttggagatcccatggctacaagcagccacagcccctggaatatgctacagaccttatctttagaacaactagacacacacagataatgacttttcgttgaagagacaggattgcagatcccttggttccataggagagaatggggtagcacttgggcatatggaaaagtgcagatttttccccctgtgctattttagttttttttttttttaatttttattttatgtatatgactgttgtgtgcatgtgtattcacagtgctcctcagaggtcagagtaggtgttgggtcacctggagccagagttacagatagctctaagtctccacatgagtgctgggaactgaacctcagacttctgcaagagcaccatgtgtttttaaccagtgacccatctttcagcccctcttttagttgttttcttttcttaatactgtaactatttaaagacaacgtggtacattgtctagactctgtgatatagagatgaactattcagtgtatgttatgtgtacatagtattccacagaacacagaaagggctgggaaattgagctgttgcttcctgtaaagtcagtattagcttgaagtaaattgtggctgatatgttaaatagcacctacagcttctaagaagtgtaggtttgggagagctaaagtggtaaagaaaacattttcttgtcttggtttctcccatctttatcctgcttgttttgttagttactgggtaagtgcctcagtctctgttctattgctgtgagacacacctcagtcaaggcgactcttacaaagggaagcgtttaactgggagcttgattccagtttcagaggcttagttcattgtcattatggtgggatcatggcttggtgtcacgcagcggggcactggagcccagggctgcatcctgatccacggactgcagaaaagcctgagcctggggtgggtttgaaacttcagagcccaccaccagtgatacccttcctctgacaaggccacacctcctaatcccttcccaacagccactgcctgggaactgagtattcaaatatatgagcctatggggaaatttgaattcttattcaaactaccacaacaggcaggtttcagtttcagtacccagtggcttttctgtatgcagcaccacacagaaccatattccagcttatttgtgtgtgtgtctcactctgcatactcactgtattagcgcaaaggtttggtattgcatgtgaaggtacaagcatgggcataatctgtacttgttcatgagttttaagtgtttggatttttaaaaagtcagtttattgagcttcttgagaacagnnnnnnnnnnnnnnnnnnnnnnnnnnnnnnnnnnnnnnnnnnnnnnnnnnnnnnnnnnnnnnnnnnnnnnnnnnnnnnnnnnnnnnnnnnnnnnnnnnnnnnnnnnnnnnnnnnnnnnnnnnnnnnnnnnnnnnnnnnnnnnnnnnnnnnnnnnnnnnnnnnnnnnnnnnnnnnnnnnnnnnnnnnnnnnnnnnnnnnnnnnnnnnnnnnnnnnnnnnnnnnnnnnnnnnnnnnnnnnnnnnnnnnnnnnnnnnnnnnnnnnnnnnnnnnnnnnnnnnnnnnnnnnnnnnnnnnnnnnnnnnnnnnnnnnnnnnnnnnnnnnnnnnnnnnnnnnnnncatatatatatatatatatatatatttcagtgtataatgtttagcaacttgtaaatacctacttctaatttaataaaaagcaggatatataattatttgatcctataaaagtaatagaaaaagacatttgaattgtgttcatacttacttttttcctctttatattataggtacatcaggagagtgttcacatgattgaagtcacaagtagtctgattaacgaaactctagcaaatcacccagagtgggcaaagtaagcatccagttttggaacaggatccacacgggtgacctggcttcagcatctgtttgtatggaccagtattcactgatagcgctacattagaagagaagaatatggtttgccaaagctttgataactggaatactgtgttgaggaagtacttcagattagagacagtttctgatatggctgtgaaggtcagactgacctaacactcagagacacccactcttgcctcagatttccaagtactgagaattcagtcatgtcctcctgatgcctggctataccttgtaatttattgacatattttactactcttttctccttatgaaagaacatttttccagacatcgtaacttgtgtggctattgacagcaatcagttttcttgatatgatcatcttgtatgtacacaatccatgaagctgctaagaactgaggctgttaatagtgttttgactcatttcatgggccagcttggtagcatgtatcatatttgagcctcagaaaaataaaaacccaggtattgttgccttggcctttcagcatgattagataattgaaaccagacctactaaatttgtgaggtttgatatttggtatatgttaatgacagtttttgtgaagtgttcgtttttcttttaacccagcctgctcccagtaattaagcctggagcattatatttacttactaagctataactgaacagtactactctgttttaatcctctaagctactctagccagaatcccagagattcttgaattttatggctttctctgctcaaactgttttctcatggtgtctcctggtttctctccccatggctatttctccctctcccatctctctgtctctttgtctgccctctctctgcatatcacacaccacacacacacacacacacacacacacacacacacacacacacacccgctgtgaggaagttcagacctattctttcccctgctcagtcattggctggtcagctagctttattgactgatcagggaataatggggaacagtgagagagaagagtctcaaaatgatatgggcacacacaaattggcatttgaataatacaaggataatctttacacagggcataataacattgtacctataggtgtttaacactgattgacagtctcggggatatagaaagtatttctgggttttggaaagcattatgtagatgaaaaggcttcttggttgaggtgtaggggagacttcttactgtagaacaaatgaaacttgaaaactacagttttcagtatgtctggacctttgtgaagagactccacatgaagagatgggtggatggaagattgaaaataattagctcatccttttaattcctggattctttggttccacatttccgtagatgtatggatctcggacatctgcagggtctcttagggtacacatttatctttcagtaggtctggaactgggctcaagcattttcatttcttaatgggctcccgggaaggttgggagctggttgtccatgacccatacttgggaatcttgttggatattgagtgtctcagtgctccggaatcatgtcctctctgctgactgggcaggtgagctaggacatgtgtgaccagagaaacggacagaagaggatggaaaagaggctgtcagggagagtagagtgcagagcctctgagtcaaggtcaggatcttcaggcctggcatcagatgttctccgtgttagtgatccgtcaataattcattgttggtagctttagttcaaagccttgttagaagaagatactgaaaatggactctttccattttctctttttctcttttctgtcagttggcttcctgaggctcaggtggtccaaagagctcttaattcagcagcaaacaatgtgtaccagtatggacgggaatggataactcacaaggtaagaaatgagcctttcttgtgcctttctctgcaggattttcacaggagcaacttcttcctttgatagaagatatgcagagattctgtttttgaatacatttacatctatagataggcaagtgccataaagtggagcaaactctcagaacgtaacacgaaacagtgccagtgcactggacagtctagagaggttgactgcttgcttgctttctgagttatttgtgcattaggatagaatgatcacagaacctaactggtcaaataagaccatgtggaggaaaaagaaattgtgcgaacacacagagtcctgtatctgctgcttactgtgcctggcagtttccaggttcatttaacagcccaagttcccgttgcactgtgaggtgttttatcacttccaggtgagaaaacaggcttagcaggctcagcagatccagatggccgtgtgatgaatttgcctcacactggtgactaactttacatccttgtttctttctgatgtagctttctggctgtttctggctgtgctttagggtggtgcttgagaataaccctaggaggactggcagaccaaggaagagtgtagctctaaacagttacctgtggagtgaagatccagaggcacgagggtgctcgtgcttgagatgaacttgactaaaggggtggggccttgggaagggagagagtgagagggaagacacagttgttggacttaaagaataactttctctgtctggagttgggacgtatccctcccctaatattgcccagagcatatagttaattttcagccttaatatgactaagtagttaggattgacaagattgaaggctctgaaatgtgtacccccaaaattgtacaagcaattaagttcttttttaaaattcaaaaaaaagggggttggagaggtagcgtgagataggcacgccctgctcatgcagaggactgggttaggctcccagcccctgcacaccgatttacggccttctgtaactctagtttcagaagatttggcaccttctgtcctctgcaagcaccaaacactcatacaataaaacaaatcttcaaaaacaataaaatagccaggcagtgttggcctttaatcccagcactcgggaggcagaggcaggcggatttctgagttcgaggccagcctggtctacagagtgagtttcaggatagccagggctatacagagaaaccctgtctcgaaaaacaaacgcaaaaaagtaacaccccaagttatgaaaaagaactcactaagagttgagaggtttgtctttcaggtttattatgtctgtccaagacgcttgatcaattggcacatgatgatattggaaaaaaattgaacaagcaagagataagtatgtgtgtatagatctttgaactgtcgtgggaggaagagtcagcttctgcaaagagcttgcagctttctataaatgtgttattttgataaagccatagcattttattcagatttatttattggagaaatttttattctgacattcttgccttttaggtaagaagataaaaggaattttggtgaatactacaccttacatcttagattaaaaaataaatttcaggctacttacagaaaagaaataactatgtaacctcttgttcaagagcctaaaaaatgaggacattgggatcaaaagtcaggaaatgtttttggttctgacttagaagacagaaggggagtatatattagccatcagttgttcattagctgttatatagatcagcctgatgtggtaaatttatttcaagtgtgacgtgtgtgtgaatggtgtatgtgattgactatgtgtgctttcttgtgtgaaggggatagagggtatagatgtgtgtaggtgggtaggcggctgtatgtgtggaggtcatagaacagcctttgagtgttggcctttaaggtagtaagtttgaagaaatactgataaatgtcacaacattttaacctgaaaaataaaatgtttttcagagatagttggcttttatatttattatgaataatttgtgtctagcttatgagcaaaccacttttataagcggtttgtaccagatataactggttcaggtatttataaggccaacatcatgtgggcaaagaagtacctaaatgcatattgtcaaccagtttggagaattagcctttcatcattaaaggaatgaagaacaaataacggtttccacttaaagcctgctgaattatctttaaggctttcagttagttcatactgccttggggaaagtggtgtcctgtgcagtactccaaagcagtacttacacaactccttagagcgttgttggccagtgcacagcactccattacttgccttgacgactcttcagtttacactggggatacgaatcgtgaaccatatgtgaagatgctgactgccttaaaaattgggactgtttatatatcctcctgtgagtagtgactaagtgcagtgaatttaataaatgaacacaacaccattgaatgtaagatggtgacaaacactagagatagaaatgcttatgattaaaaaaacacagattttatatttcatctctgtgaatggataggaagttatagaaaaaaatgggaaaatggaagcagttattttaagaaaatggaactacaatccaatgcttgtcttttaaaattgtcttgagagcctggcgtggtggtgcacgcctttaatcccagcactcgggaggcagaggcaggtggatttctgagttcgagaccagcctggtctacaaagtgagttccaggacagtcagggctatacagagaaaccctgtcatgaaaaaccaaaaaataaaataaaataaaataaagttgttttgagactagggagatggttcagtttgtaaagtatttggcagtttgtcttgcaagcctgaagacctgcgtttgttccccagcacctatgtaaatgaagctcagcccacatctttaaccccaggacaggcagaagcaggtggggctctgtgagttggaggccagcctggactacaaatgagaaagatcttatctcaaaacaaatgaacaaaagaaaagccagccacaggtaatccctgtgttgcaatcccagtgctgagaaatagaggcagtaacatctttgggctgctgactggccagtctagttgaatctggtgagctcaaggttaatttaaactctatctcaaaaagtaaagtggaaaatgactgagggagacacgcggtgtccatcgttggttttgacactcatttgtgcatatgtatgcccatacacttatacatacaaaaatcaaaatctcttaagtgcccccccccccttttttggcctgtgctagggattgagcaaggtaagtgatctcctcctgagctctttgctctgagctttacaaatgtctctaataaggaaataggatgagacactacagtgagtgtaagttgtgcctgctgtgtcaggttcccagaagtctgtcctgccagccctgcctgtctcagcagactcagggagagatttgtgcttgtatgtaaggtcctaaattttacttaagagtcttaaggcaacccttaattggagtaatgcaagacttaagctctatctagacttgctttggaaaggctttccactggacaggtaaggccaactaggtcattaagtgtgtttgcatttgtcttgttctcttgtaccctgagacccaggaagagaagtgggagggaggatgagagagaagatgggagaatttactggaacatggaggcatttaaaaacaaaacaaagacccagcatgtattgatcatactaaattacttaaaaatatcaatcagattgtacctgtatttttcttctagcttcacaaaattctaggagataaggtgaacaatacggctgtgattgaaaagcaagttctagaactgtgggacagactgtatcactcttggtttgttaaggtaagttcttttagattaagtgtccatagtaactagtaatagcattgtgctttaccgggtgattgggtctataggactgtgatggtttgtatatccttggaccagggagtggcaccatctggaggtgtggccttgttggaatgggtgtgacctggttggaatgggtgtgtcactgtgggtgtgggtataagatcctcaccctagttgcctggaagtcagtcttccactagcagcctttggatgaagacgtagaactctctctcagctctgactgtgccttgcctgcctgcctggatactgccatgctcccaccttgatgataatggactgaacctctgaccctgtaagccagccccaattaaatgtcatcctttataagacttgccttggccatggtgtctgttcacagcaataaaaccgtaaccaagacaaggactttgttaactttagagtttcacttcccattccagcagtgagaacttaagcctttgttagtgtcggcttccattggtggttagtttctttggcaagccccgtaatctctgaggtatcctcttccatcatttgctcatcatgtagtatcttcctctgcagtagctgtgtacagtgcacatacagaagccacgtctgtttgctcatggtgatggggattgagcctggcatcgtgtgtgttaataagcacaaggtctgtcactgagctgttacactccaagcttctacaagccacgtaggtggtatttttctagtagctgcattaaataactaaacacaaacaagaatattaactaaaaatggatgagattaattttaataatattcatttaattcaggttttccactgtcatttcagtatatactttataaaataaattcagtatacaaccaagtctttgaactctttcaagtgtgatttgcactagcagcacagctcagatttagtgtgagccatattttaagtgatcagtagccacctgtggttagtggctattgtttggaactagtgaattctagactttgaaaacctttctgtttgaggagacagaaatagatctaaacttgagaaactttcccttccagactgttttttgtgttgcttatacttacacactctaactttagagtttatggtagaacgagcgtggcttctactctgtataaacagcggaatctgctgagccggtttttaggccatgttatatgaacagtgggtgcagagctgctggttttttcccagggttaacttgaagagaagaagaacatgccagaggagggtggccgagtttgagtttcttgcttaacaagaatgtgacatgttctacatggtgtggtctttccctgagatgagggaataataatgacttccgtggataagacttgagagttaaagctaacagtggtatgtgagctaaagtatttcattgtgtctgaggggctaagcagttagaaaggtctcattcggtttttgtgctcactctagatcttcttaacatgtagcttttcttgtcattcatcctgtttgagccccgtttttttttttgttggagggccagagacttgaagacagatgtgtacatgggaaaactgggtggtggtctctccctctcgcatgtagcagactctagagcatctgcgctcaggaagaaaggaagggcacacaaaatgttgacttgcctctgaatttcaacctcattttgtctgctcgtttccctttcaaattcagtgcttcctgcccatgtaaattttttgcagacagacaaattagatcccacaccccttcttggctcagtgttagtttcttctctttctgctcttacattattacatagtgtatataattaagaatggagaaagaggcaaaagtaggaggtcaagagaaggtagaggcgctgaaggaagtgaaggtttacatgcaccctctgggtgctgtgagttcctggttaggagagaagcagttgtgtcgccattcacagtacctggaatgcgaatgcagaaatgctgaactactagtctttaggtggaactctaacttaatatcttaaatttgcaaggattttcataggcgagtacttactgaattattttaaacaggtgtaaaacaaaagaggcatttatcctttggacgtgttaaaatgggagtttcacatgtcactggccttgttccatagaacgtgacacactctggaaggcacaaagggcacaagatgcatgtgagccgtcagaacagctggctgggagatattttggactggcaagatattgcctctttcgttcatgagaacatcgagacttttctttcggtaagatggagtggttactgttggttgacttaacccagcttttcttacctcagtgtcttcagctgccctgtttttagtaccatggaatgcataggctttgattaaaccagaaagctgtccagaagctgagtcttgaggtctggctcagaacacccgagaaacgctgactcctgaaacacgtgaacaagcctgtgggctcaggatcaccagagtgccctaagctggacattacagacagaccaggttttctggttggtaaagcccttgatatgtggaagtagggtgggcatcactagaggggcagtaaaggctgcaccagctggcctcccactgaccccgtccgccttgcatcctaccccattgttgaaccttaatcaccaccttcattccccagagccgctttgccaggtgtcttggcatgtaacttcacagagaagatttttcttgtgaatgaacatgtgactctcatcaaattaacaagtttagaggtactcacagtactaaggtctaaggaattcaggctgagtggaatgatccaggagcatagctggacgccgcccgcccgggtgagactcaggactagctgtctgctgctggacagccttctctggtggttgcctctggattgtcaaagtgatgtttatcatgctctttcttgttttgccattttagatattatcttttggcttccaaatatggaagatgaaggtaaagatgtgactttttccaagccttcggtgctctctgacactcttgggtttctcacctctccctcagcccagccacctccctgcactcccatgcttttcctctcagccgaggtgctgtcacaatctgaaatgaaatctgaaaagtgatgtctttcattttctgtgttctaattaacagcttaattaatagggactcactctgtttcccaggctgtctgtgaacttgtggcttcaaacaatcctcctgcctcagtctccaagcaccttatattacaggcacttgacagggtccccaactatttgtgttgataatctcttccctctgctttactagcccagtggttctcattttcgtgataccatgaacacactttaatgtgttaaaagtactattttctgaggctcaggaaatggcttagttgaaaaagtctttgctgtacaatcatgaggacctggattcagactctacatctgtgtaaaagtcagaggtggtggcatacacctgtaaccccagtgctgagcgggggtcgggggtgggtgggatgcagagacaggcagctcatctggccatgctgggcggccagtctgtctgatagatgcgctccaggtgcagtaagaagccttgccttaaaaaatgacgtagaacgtgaatgaggaagacccctgatgttgacctctggcctccattctcatggatacacaggcacatgtgatctacacatgaatgtccgcacacaagtacctaatttatatcatgctaaatgttttgtaaatgttttctaatttaactcccctcaagttccttagagaaccaataaaattgttcttgttttagtcacagactcagtgtattaaagcagttaacacgcactcagttttcttttctggttgaggaatggggttcttttttttttttttttttttttttttttaaagatttatttatttattatatagtacactgtagctgtcatcagacacactagaagagggcatcagatctcattatagatggtcgtgaaccaccatgtggttgctgggatttgaactctggaccttcggaagagcagtcgggtgctctaacccactgagccatctcaccagcccagaggaatggggttcttacagagcatgcattatcttctagaacacgtttcctcctcgggagagcttggatctctttgtttcacgatttgccttatttgtctcctgtcctgagttttgaggcatggtcttcctaggcctggaagcttcacagagctgcacctgcccctgcctcgagagcaaaggcgccagggtttgctgcacacggggtttgctttggtctcctctgatgttttggcaggttccccagctctccccagggtgcttcagaagacatagagctccctacactcagttctacacccttacttgctgcttgagtatagtttaccttatttagtattgatgttcagcctttctgaataattttaaagatatatttttattgtccttatgagtgttttccctgtatgcatgtatgcagtccctacagtggccagaagagggcatcaggacctttggaattgtagataacagatggttccgagcccactatgtggatgctatgaacggaatctgggtcctgtgtaagagcagccagtgctcttaactgctgagccatttctccatattccctgactagttctttattactactttagaatagagcctggtgttagattgtcaactaaactaatacaaggaggcaaattatagcttctctttattatttttgtactttaaagagcagtggcagagctgaagtggcatactgagacttccttgtgcagttcatttcctataaggctagagcaggaaaaggaaccagaaaggctcagtggagcttatagccagtctctgggctcctagtctgacaggaaggtaaccccatctttgtcggaaagagttctgttcatattttgacccctgaatccttgcagtgttctgtttttgtgcttcctgggttctgtagaatgacactcagagggaggttggatggtggtggactccggagggaagcagcgaagcaggaggatgctgaggccgcttgttcgttctaactgccctgccctctgtgaccaagttgcttagctgcttgtgagtctcctctgggcttacatttcatggccggggactctgtttgaggcatctttttggttatgttgccactattgaataaattaatgccagcccagctcatgtttgccatttttgagttgggatgcagttttacctctacaaatcggttgcgtttttgaatttcatgggctttcttcctgatcccgcctttgctaatccctcctttctaagcctgctgattaaactcaaactctactttgatgattgagtgaacattccagcactgtcctctgtgttgtctctagttgatctcttttcaagtaaaaagggttacttggttgttgttggagactcccagtctacaattgctgtattctggtaatttcttaagagttttctatttgtgtgacttagaaactatgtaaattttttgattaaaaattccagagtgactggggccccaaaagtatgcttgccaaattacaaatacaggcattgtctcttagaattggtggctttgttcattcattctttatcccacaaggtcaaacagttaatggtgcatatttttgtaggcacagtgaagcattttcaagatttttttgtaaggagtttttgtaaatgaagcctgcctgttgaattctcatataaagactaagctgaggcttgcaagacattctgaaggcatagaatgtcccttataaattgtgcatttgaggtagaaaaggaatggcaacccttgcatagactgcatgtcataatatgagcatgcgactggaccagagctactgccttagaaaggcgccaaagagaactgcaggtgtcagggttctggtgctagctgcagcaaccctttgtgactgagctcgtgtctataaagctatccacattgcttccctcacagcactgtcctgggaacattcagtagctggcagaactcgtcctcctgacccttttggttcctgtttcgttaggaggagggacccacttgggaagaacagacattataaggggttttagttgatgaaggcacaagaaatgaaacggagacctgagaagacattgacatctctctttgctcatgttttaccaacagtgtacacaaccaacttgataactgcttctcttcaatttataggtgatagtgagcttagtctgtcccaggaaaggctctgtcattgatccttgcctcttcattattttcattgtgatttcaagactttggaataatacattatatttatagttgaatcagagttagagatggaaaggatagagggtagttagctaatctaatgcgtgacctacacttacagccctccaaagtaaatagatccacagagagatcacgtattcttctgtagacatacatatattctgtttttatagttaaaattcatagaatatataaaaatcctgtgttttaaagagagcataatagaagctggccatggttgtgcatacctttaatcccagcatgtgggaggcagaggcaaataaatctctgtaagttcgaggccagccaggtctataaagggagttccagggtagccagggctgctccacagagaaactcagttttgagaaaccaaactaaccaaataaaaccagcataatagagtgaaatgtctatgatagttgcggtactattttaagtgttatttggagtggattcattataactacttagccattttctttactattgaactagatgttttgggatttttttctgcttataaagcaggcagcagtttttacgttttccactatggctagtaagacagtgccctaaaagcacactgtgtggctacggctgtcccctttatgaggatttgtgttgaccccagctgtccctctccgtcagatcctggagtctctgtggattgttatgagccggaacgtgagcctgctgttcaccacagtcaccaccctgctgaccatcctcttctacagtggcactgcccttctcaacttcgtgctgtctctggtaggtacatttagacagcacccattgtattcccttatggattacagcatttcctgggctctgtttttgcgcatgtatagcttttatacgctcataaatgtgatttttaggagatcctgtcctttgttttgcagataattttcctgaccacactgttttatctgttaagttccagtgatgagtactacaagccagtgaagtgggtgatcagcctgacaccactttctcagccaggcccttcctctaacatcatcggccagtctgtggaagaggcgatcaggtagggacaagagcatgctgttcttactagcgtcccgtggcatcccggttaccttccttgtattcatagaaacattcagtgtggaagtagtgaaggatgccagtgttttcaagacctttatcttactttaagaaggtcctaggagcagagcacatgctttgagggaaagttcccaggagtttgtcactctattctgctgctgtgatttacaaagacctgatatgtgttcacagatcggctttagtccggtttccataaccttggcatttgctcaggagaacgcctcctcctcccacattgtctttacctcctggggcccttctctgatttcaggaccctcctgttttgtctctcttgttatgttcaactgacccaacagttgtctgtgtctgtgtctgtgtgaaatgccctcagcttttctccccattcctactcaggaagcctggggaaggtctttattaatgatgaaaattgcaacaataggttatcttttgtttatctgctttttaaaaagtcttttgtaaccattgttaccctaaaaggaaaagggaacaaaacagacaaaacccctctcttcccagtagcataaaaatagcctttgagaggctggcagccatcttggtcagtcttcagtctggctgaggcagagctgtccgggaggacaggtgcattgcccaggaagatcctttaaaggccagctctgctctagctttgcactgttgcccttctcatagaagcttcaccttctgctgtgtccctactgcgctttctacagggagcagctttctgactgacatcaaggtgcttttatgcaagatacttctgcaccctccccagcgccaggatcccctccnnnnnnnnnnnnnnnnnnnnctctctctctctctgtctctctctctgtctctctctctctctctcctgactcttcctttgccacccagggctggctttgaactggatatctcctgtctctctctgtttcctgaacgctagggttactaggattacgaatgcacactaccatgctaggccttgtcacttaacattggcactgtcgtcctgttggatctgaaagctgatgggtgggtttggatggccatcttccactgtgactggcttttgcattctgcagccctgtgtgctgttcctttacaaagttgtaataaatacttaatatgtttgagttttgcatgggctcctttgaggagtcttcaggaggaaagcgtcagtgcactgtgtctaaaagttaagtaggaattttcatcctctgcccctaaaggcgttgcaggtgtggctgctgtgtcacatgtgtgtcagtaggtggcagagaggagagaggctatgtctacgctcagtgttctgacctgtgaacatctgaatgattagtagcctaacattccctgaaaaaagtgagcctgagatatccaccagtctggtgccagagggcccagacagggagctaacctgagacaactgctattcctgtaccaggcagatctggaagggctcccaggacaagcaagctggagactagaagagctctgcctgggaccagaggccccaggcatgagtgagcccaagacagaccgccacttgggtaggccggaagaggagtgagtctcagatgagatgaactccagtcttgtgccacgctggcctgggggtatagaccatgcttgagatgagccctgcctggtgccataatgcacgagcgggacctagcacttctgagaccactcctgagacgaccccagacactcggagaacccaggcgccactaagaggagcaagtgagtggttgagaaatagaagacaaagagaaataaggatgtggtcacaatgaagagaggcagaactggacaattacgggtaatgaggagcagcctcatgtgaatagccagtgatgccacctgagaccatggttgggtcctagcctgtgctgctactggaggccacatctgggacggatgttgccaccaaaagcaaggcagacatccctggtctgggctgccaactgtggccttgttgatctccgagggctatgctcggccctgtcttcacctgggcgtgtgggagagttagctctagaggtatgaatgtaggatccctgaacctagccagctgccgtactcaggaaagcagcaggtgagttgggcctgagcatgggacagctggccctaccactcatctccctgtggttgcttagatgagggaaagagtcccttctcccctgtcctggacctggggtcatagagcagaagagctggccctgtccttcaccagcagcagcactcagaagagcagcctctgcacctcacttgggcacagcagagctgaccagggtagctgaggttatgggtgtgagagcgtgagagccagccctgcctcttgcctgttggatggtggtgttgaggagggagagataccttacttcccctccctcatttttggcagacgggagagctggccctgggattctgagagtgagagaactggccatgcccctcactggatgcaacgcttggaagagcagaccctgcacctcacctgggcagcaggatagagctgggcctggtgtggggctgcagagcatgagagccggtgggctgaccaggtcagatacctctcaggcccagatccagggctttgaattggcccactccaacatctaccccatcagtgaactgctagagtgtacaaaggggcactacagatccaaagcctatctccatgacacagggcaaccacagggtatatgagaggaggcccagtgaggttccagtattgattgagtagtagaagccagaggacttgtaccagaccaacaagtcattgtaatgaacatgtgcaggcaaagaagtgtggacaaaaggatgtcctgtgggacacactgggacacactacagcttccacagcaactctgttgtaggggcagttgcaagggtggaggggagggtttgggggtgttggggggagatgagtgggattggagtgcatgatgtgaaattcacaaagaaaaaataaaaaatgaaaaaaattaagcttaaaaagaattttcagccgggtggtgatggcgcacgcctttcatcccagcacttgggaggcagaggcaggtggatttctaagttcgaggccagcctggtctacagagtgagttccaggacagccagggctacatagagaaaccctgtctcaaaaaaaaaaaaaaaaagaaagaaaaaaaagaattttcatactggaggattatgttcaagtagaaatatgattctttgtggatgaagattaatcaacaaacaattacaaagattgtagttgattctctgtaagtgctcagtgacagcagttttataaatatgtcatcagtatatggtcaaatgaaaaatcatgaagttgatttcatataatactttagttaggcatgagtgagattgagagttagttgcatggcatacagaagtgtgtgtcctaaagattgcctctaagctgtggatttcctttgtgattaccgtgtgtgactttgaaattttgaaccttattttaattttaagttcctgttattctaaacggagtgcatttgtcactgagttttcatttcatctcaggattttgaggtagtggcatgcatcctggatccccagcattggcttcccttagagcatgctgtctcctgaatgcacacgtcacacccttctccccgaggctccctctgcttgctctggtggagatattgcacattactaagttgcatgttgtcacggcctcaatgcaatttagtgtgtgtgatattttcacatgagtgcatgcacacgggtctgggtcttgcttgctgggattagagcttttccatgctggagggctgaactggtgctgagtttcatgtgaggatgaatgctttgtaaggtttgattccgagaatggccatgttctacttcttcacccagttctgaagaaaataaaaatgttttagttatttttaaaaagttagggttgcttcttaagtaaattaatgttttcattttctaatttgagtgtattgttgactgaacaaaattcttagagatttaaagatgtaagtaatacttgtttaaagtaaaatgtgcagtaacaaatataaagatctctatnnnnnnnnnnnnnnnnnnnnnnnnnnnnnnnnnnnnnnnnnnnnnnnnnnnnnnnnnnnnnnnnnnnnnnnnnnnnnnnnnnnnnnnnnnnnnnnnnnnnnnnnnnnnnnnnnnnnnnnnnnnnnnnnnnnnnnnnnnnnnnnnnnnnnnnnnnnnnnnnnnntcggttgagagatggcttctctgtgtagccctggctatcattgtccttgaactccctctgtagaaaaggctgtaagtgctgtttttaatataaacttaagtggtaaattaatacagcggctgagtttctttatcctagttagttcccaataataacacagagacaccaagaattatttttaaacttcacctcaatatctaggcagtctgtcttaatctcctcccctaagctaatctggctaccgccagccaagaatcacaataatacttgaaattatgcttctcatgtttctgttgaactctcaagaactttcttccttctctgaataccccctaccccgtgtatgtgtgttgtgtgtgtgtctttccttccccccctccccccttgactagcagaaaccccaccctattctgtcttatgcccagccattgggtgatcagcatttacttacaaggaagagaatagtttgcatatgcttggctcagggagtgcctctattaggaggtgtggtcttgctggagtaggtatggccttgttgaagggagtgcccactgtggaagtgggctttgagaccctcctagccatgtgggagacaatggtctcctgtttgcctttggaataagatgtagaactcctccagcgccttgcgtgcttggtcactgccatgcttcccaccatgatgataatggtctgaacctgtaagccagccccaattaaatatttttctttataagagttgcattggtcatggtgtctcttcacagcaatggaaaccctaagatacaaggataatctttacatattacacaaaaacatgcctatactaggctgaccttgaactcagagactcacctgtctctgtttcccgtgttgggattaaagacatgtgccgccactaccacccagcataaagttatttaaacaaaaaaaaaaaaaaaggtgtttttgagctgcttgtagtggcacatgcctataatcctagcatttgagagcctgaggcaggaggattgctgtaagttctaggccagtttgaactacgtagagagtttaaggttagtttgagctatctatcaagacaccccccacgccccaaaaaagtggaatatttgagatatcctagcattgtaatagaatttcttatgcatactttgggaaattaactggagtaataatgccttttagctgagtggttagaggttagtgtaatatacttgaatgtttgtttttattacgtttaaaggaaaatagcctttaaaaacgttgtcttatatgtagcttttcattgagtaaggtgaagcgggagaggggggagggtgaaggatctgtgatggaagggaggttaggtatccaagcgataactagaagatactgggcatgtgcttccagactgttggcctattgatactgcaataaatctgacatagggtgctttggatttccctcctacctctaaagtgtatgtttaacctgtagtttatgaagtgtgcaatagcattgcctctttaatataactatatatacacaaattaaaatattttgctaaaaatacattaatgatcagctaagttgttggaaaaaggagtctggtagactgcctacattctgggttgactcaaacttcaatttgttgaaactagaatttctgcacagtatatgaatttgaagggacagtggtatacctgtgatcaagggagctggcaccgtccctagtcagcatggtagacactgtctgttgctgctcaggggccctcttcgttgatggtgccattgttttctggggagaggatagtctggtgctcagcctatctttagagaggtctttagagaggaagggtggaagtaatgtacagaaatgtgaggtaggtggggttttggactcgactcattttctgtttcctttcttcctgagacgcgtgcttcctccttgtctggcttgtggtactttgtcccccaagcctgtctgagccgtgactgtcctgctcactctgtaacttgcttctggtttcacttcatccagagcaggttgagggattgaagttgtcttgtttcttcttcagtttagaaacatggttgtgtgagtgaggcttgaagcacacactcttttagtgccactcactacagatattcttaggattatcaggggaaagggtgcagaggaaagataaccccagctcagggtagaaagaaaggctgtgctcatcccataagtggtctgttttggggtgagctgatgtttgagtcatctttggggagcctcagttgagttactttattgtgtccttagtgccaacttacttttactatgaaaaacttgtaaatgaggtgaggctaacgaaagccacctttccacactagacaaattcctcaccctagtagttcatgtggttactcttcctccctccccagcttccctttccagtggtctctgaggaggctgcactctgattttctctaatgtagaagggattccatggcctctccttggctgatgtggcggtgtcctcaggtctccgagaacagtcaccttccccttcctttccatgcttgcccttggagggtatcctgtcccctcctctaattggactactgccccttaagcctactaagcctcgcctcttgtcttttccaggccagccattctctctctctgcttatctatgtttccctatcatttcttttccttagacttttcaattcctttgtttcctattggctatctcctctcctttctgtctttttgatgtatttaaatctgggtccatgttgagcgagtcacatgactcattcttgagtgacaccgttggtaaagttggcaaaggttttgcagatggagaagtattcattgatagcatgtgccagagtactgttgcatgaccgtcactggaccacagatctcacttgtgctctaggagcttccctcctgggaatctttgcagaaagcccgtgtgtgcttcatgtaccgtgtcactttgctgccatggtcctctttttcagtgacagcttcaccttcttgtgactgtctgcccctacatagccctggcctctgtgtttctgtggttcctggggttatttggggcctattctgcacagggctgccttgctgcctcaattcctttcaacagaaaagtgtcatacagaacaagatatagcctgtttttgctccttgtattttcctgcctgcttttactctgcagttaataaccaatcatctccccagatgacttgcattatttgataccatgataccaaaagttactttgtagttttggttgcataaagaaatgtatgaaaatcttgttaaaaggaaaaattgacagactataagttagattattcctcactcttctctggcccatccctttcccttctgtttcctttcctgcattctctcccccgttcccctcttattcctcttttcctctgtgctggggcttgaacccaggacttggcgtgtgctactaaacattgctctaccactgagctatactccgcacctcacttgttctttttacatgtagactggatgcaggctgggtttcttagaacttaattctttctttagacgtagagaatatgattcttacccaggaaatacctactttagaagtggaaagttggccttagctcagttaagtgcttgcataacacacaaggccctgagtatgattctctcccaccccagcccccactcaaagagagaaaatcggtggggaagttcaatgatacgcttctttaggatgttttgagtttttgtctcatcagagagaagtgtagtttgcagcttagatatctatgggctttagtattttaataacgtaagtagcattctcagacaaatgagacctgttgccagacttggaatacaatgactggaaacccggaggtgatgagttttctgagcatgttatgatgctaggattgtttaccttttcttttctgtctgggttttctagaggggtgttcgatgcttccctcaaaatggctggcttctatggactgtacacctggctgactcacactatatttggcatcaatattgtcttcataccatcaggtaacaaccatatacagaacttcctggctatttaaggaaagttagaccttgcgttagagctgccttcttccttagaataaggtctctggatcagcaatgtgcttgtattttgctgtagcctcagtatccggaactacacccataatctagtcatttgcaggtgttgttgaatgagtaaatgtctaatacttatataacattgggcatagttggtactcagattaattgaactaattggcaaggagtgagcagtttgtcgtctgatagctttgtcccatgagggatgccatcccaggggcaggatgagtgagtctgagcgggtttaattaagcacttgtgccttttgtgatcctcctctgagacacagcacctccctcctacaagcagcacacaggctggtgacaagcttgcagtttttccttgtcgcttcagaacctctgtctgtccactttttaatttttttgtcactgtttctctaaatatccccctccttccacactctctgctgtcagcttccattctccttccttccttatgttccacattcaagcttcctttttcccactcagctgtagtaagtagcccaccctctgactgtcactgtaccctgtaagtagcccaccctctgactgtcactgtaccctgtaagtagcccaccctctgactatcttgtaccctgtaagtagttcaccctctgattgtcttgtaccctgagaccacacaaagctattgtataatcatgttaaggcaggcaggaaaggcatgtatagatgaaagtcagtttttcaaggtcacccagatggttaacggttagaccagaacaagaatccactgctgggtggctcttagtctgaagggagcaaaaggagagagagcttggactgctttgggacaggtgaatttgaagtctttctacttacaggatttttatttgtttatatctagtatgcttaattttttagtggcaaggaaagaataagaattcaacccctctccccccccaaaacaaaaaaaccaaaaagccaggcagtggtagcacacacctttgatcccaacacttgggaggcagaggcaggcagatttctgagttcaaggccagcctggtctacagagtgagttccaggacagccagggttacacagcgaaaccctgtctcggaaaagccaaacaaagcaaaacaaaacaccccccccccaaaaaaaaattcaacccaaggggagaaccagagtgggtggacaccctcatagaagcaggggtagggaggatgggatgggagtttctggaggggagagtgggaaatgggataacatttgaaatgtaaataaataaaatatccaattagaaaaaaattcaacccaagatgaagattgacttgtgagtaggacattttggtgaatattctatacttatatttctgggactggattttattacccaaagggtaataggatttaacacttaaaatctaacataaactagggactggagagatggctcagcatataagagcaatggctgctctttgaaaggacctgggtgttcaagtcccaacactcatagcagctcacaactatctataactccagtttcagtggctctgacactcttacacatacacaacaacaatgcactaaataaataaataaataaataaatatttaaaagaaaaaaaaaagaatacaaacacataagctggacacaatagaaaagttttagtaacaacttttaagatagtgagctgttatttaactaaaaagctcaaacaggctctaccagtcctctaaaacagaagcctgtgttcacttacttatttgggtagacttttaagaagattatttttcattttatgtgtgtgggtgttgggtgcatgcttgtatgtattagcaccacatgtgagcagtacctgcagagacttgaagagtatgtcagatcctggggactggagttacacgtgactgtgagtggcatgtgggtgccaggattcaaaccagtgccctcccaccagagccatctctccagctgcagtgggtgggggtcgtgcttgggccctgctactttgtaactgttgcccgggctttgattgcttctcttttactcctctattagctttggcagcaatccttggagctgtgccatttctggggacatattgggcagcagtacctgccgttctagacctgtggctgacacaagggctaggatgtaaagccatcttgctcctggtctttcatctcttgccaacatacttcgtagacactgcaatctactctgatatatcagggtaagtgttctccagttcttgctcagtcttagggtgtttggtttggggaagggttggggatggagtagtggcaatcagttgggtagccttttgtgatcctttcacagtgaaattcaacaatgttgaattacattgttgtggtaaatttctgatcgttattatgtaagtataaaatccaaaattaagaccaaaattatgcataattctgttttgagttttgtggcatttagcctaggaaaaaaagtattactaagcatatataaaatattttaagtacaataaagagttagtggagggggctggagagatggctcagtgggagcaccgaatgctcttccgtaggtcctgagttcaaatcccagcaaccacttgatggctcacaaccatcagtagtaataggatctgatgcccacttctggtgtgtctgaagacagctccagtatacttacataaataaaataaataaataaatcttaaaaaaaaaaagattgccattggaggcccacttgaactacatagcaatatcctgtctcattgtcagacacagagcacggaactggagaaccatctctgtggttaagaatgtgttctttcaaaaaactcaagtgtggttcccaacacctccattgggcagctcacaactgtctgtaacggtagttccagggaatccaagatcctcttctggtattaagtcatacaaacacatatgcacatacacaaaaatcaaacttataaaaaacccctccgcaccagaaaaaccaccccaaaacccaaagcctgtcttagtggtgaatactgtaatcccggcacttgggcaggcataggcaggggactaacctagttcaaagccatctactttccatggcaagctgcaggccaggtagggtaccagggagaccctgcctcagaacattcagccacagaactggttctgtgatcaactgatcgtttaacaactgaggtttaaacagtatatgattcatacttagtgctctgtgtatttaaactcgctgtaaatttttttatattaagggttatagttataattcaagacttatgtgatttttctcataatactttatttgatcagttattaaaaatgaaaagtgtgatgtacacacacacacatatatatatgtatatgtgtatatatacatatatatatacacacacacacatacgtacatacgtacatacatacacacacgtatatatttggggggggctttttttttttttttgtcgagacagggtttctctgtgtagctctggctgtccaccctgggctactctgtagaccaggctggcctcgaactcagcaatttgcctgctgctgcctcccaagtgctgggattgaaggcatgcaccaccactgccccacataaatatatttttaattaagcttttatttaaaagttctccttgcaccactttaagccttaagaatttctggtacttcactgctataagtctttttggaagaagagaactaaattgtgaatattatgtttttatttcctgaaggctggttcactgctgtgtgtttgtaaactgctatgtattccaaaatcctttttgtgtatctaattatttaccttgatgaaaactttccactcatcagtgttatttaaaaactagaaacacacagaccgtgactgtttctttgtccctcttgcgtcagtggtcaggacttatctgtactgtgttgctatatctgtctccctccctcctggttgtgtcagcattgccgtcatagcctgtgcgacagcatgactcttgtaaaataaaagtcttgtgctttattgacagatgtcttccatatacaacctgttattacacctgtagtagttatattttagaaggttgccaaaggtcaaaactgaacaaaaggagtattgctgttactattttataaaactgtaattgttgttttattaaagaaactatacctgctaaattgcactcactattatccttaaaggaagtaaacctagcaggtatcttaggtaaccagtcttgaggcagcaataatcttcaggaagccgtgtgggatgggttcagactacctgatagcagcatgcttttattcttttagtggctagtcctgcaaaaagaggcagaggtcactgttggtacatatgggagaaaatctttgtttctcaatattattatatgttcttaattctacattgatgtaatctaaagaaagctagtagtggagtaatatcagagataccgcattgtgttagaaagtatttgggacttctccaaagctggtattcattggaaatcatatgttggactggtatgctttttgttccagaggaggccacccctacctgaccggcttagcagtggctggtggagcctactacctgggcctagaaggagcaatcattgggcctatccttctctgcatacttgttgttgcttccaatatctacagtgccatgctagtgagtcctacgaactcgatgcccacaccaaatcagaccccttggcctgctcagactcagcggtgagttcagcagtatcacagtgagcatgcgcagagacaggctgcgctgtgtgtgttttcaacgaatggctacatctggggcttatcagggtcaacttctccagcactcctttccatgcaggttatttccaccagtcctcaaggcttcttctctccatctgcctattgatatcctgactgcagtcacttcagaatagctttaaacatggtctaaaatgtactgccctcctgaggcaggctttgcttggtcagtgtttctgcctgaccatatcattgcttgtttcttcactcaatcttttcattgtctcagtgtaccagcctcatttttcagtgcagtattaaaaggcatcaggtagatgctattttatggctattaaaagacaagattctgtcatctggtatgcacatcatagtggttgtgaattatattttacttgcttgaatgcctagaagtggaatgttttctgtgtatcagatttaatgtcaaaaacttgcaaagtaaggtaagtgtgttgtctcatgcctaaccccagcacgtggaaggcagagcgtcgagagaatcaacagcttgggcagcagagactatcccagaatcaaacaataaaaccttacaaaatggggtttctgtgtaagtcatgcagatgtacatacagcctagaaacaagataaacagaataaataggtttaaccttctagagactgtattatgttgtccagcttgtcaccagtggggaagcactgagttctgctgtgtcattatatattcttgtgtactttgagtcactgagaagttggtctgacagtccctttacacttctatacttctgtctgtctgtctctctgtctgcctctctattatctcttgtctatctatctcatgtattatatctcaaactcagtttccccttccacacttctatccttctaggtagaattttaaagtgtagtgcagctcactttgttttaaatatcatgtcttttgaattgatcagagtagcttctgagttagtcagttgctcagaagcccattggtgctcatacctttatattttgtttgttcatatttttattgagaccggatctcagtgtgtcattgtgtagcccttgctggcttggattttggagatccaccttcctgtgcctccaaatgcaagaaccagagctctgcatcccgacacacccatttagtgatggctaagaaaagtccgttttctcaggaagactagaacagcgggatgtaggtgactgaccaaggcttcaccgccaacctgggctgttaacactaggactagatcattccctcccctcccttcttccctgtcttgaggccgtcttcctgtggagcccaggacagctgaattcacagtccactctttagcttcctgagtacggtgtgtattacttccattctgtttgcttttcctcttcatagcaggagcttggaaacctgcacagtgaaaggatagtttcttcaagctactagagagaatgacagagtttcctaatgttttattgtatgggtgtgtgtgtgtgtgtgtgtgtgtgtgtgtgtgtgtcttctaatgatttttagtatataaaccaagattcactgaaagatgaagcaagagaaaccagtatatacagacaagagaagacaagagtaggaagctgcatcatcaggtcaggatgctgggaaaggagatgtgagggctgttagatacccagcataattccatcagtcattcatgcgtgtgggcagtttttgccaagctcattgtgaaaaacagggctttgcctttacccagcagcagtgatatcagtgaagggctttggttttcagctcatgttaaaaataagacactgaagttgtaggtgggctattacatttgtggctttaatttaatctgacaagtccactaccctgtgcagcccttaatggctgtgacttttggtctcttttgtgcactgataattcctcacagaaaggtcttcagatctcttagctggaggttgcaagcccagctgcagccaggagcagggagggggcaatgagttgaagattcagagctctgctgtaggtgtagtaccctgtgctagtacacagccacactcacatctctgcctgttgttcctagtccaaaactcattcccttctccagaggaaagctaggagtcggaaagaaggaagaaggatcagctgcttggttgggtggaggttggccggggtggtcgagggggccgtggtgctttcttagcagaggagcagcaggtcactgctcagtcccaccctccactctcataggcagcacacagtctaacctgcttctgaaccttttgggtatttagctcagtgaattaattaggttgttttagtctcctcctaataatggcttggagttcttgcttttcagaggtggctaagtctgagtggttgcccgttggattcaccccaccaacccccagttgaggcattctgggcctaaaggaaatgtgcgttttatctgccactgtttaagaagtaacacaaacaacacttctaacatttgctgagacttaccatgtgctgaatcccatgataaaaacatcatgtgttatctttatctgttctggtttttttgagacacggtctccctctgtagcccgactcgcctggaactcactgaagttcacttgtttgaccctccagagtcctgggagtaaaaggcatgtaccaggcctggcttcgctggtgtgcattactgttctgaacctattagtattttccaggatgcttaggtgacatagtttagaaatattaagttgctctatgtatatatagttccaggcttgcaagctgatctgttttaattgatgctctgtctccctgaacacaccaaccctgagtgtgtgtcctaactcagtcgctgtcctgtcccttatccagtccttgaatctctccttgccctttaccctcaccacaagggtctgagctggcacttcccttggggctgctgtagtatgcgtgccacctgtctgtcaccccctactgttgtctggccactgttggctaactgctttctaagcttgtttcactttagctttctttccttgggaaagctcatccaggttttcttggccgggaggcagcactgaattcatcaggctaaccataatgttaatcttattttatacttctttgtctttcaggccgacagacattttatttataaattagagatttctttgaaatttttaatgatgtaaaaggataaattaatcttataggatgttaagaaatgtttataggttattagttgtaaaagcatttccaaggcttatcaaaattgagcactatctagattcttatttgttggagaaagcttctagccaacttgcctgtcttcaaatgcaaaaacacaagctaagacaacactcttgagaagtagttacatagatagatacttgcagtgttggttctgacagagttgcagaggaagtcttttgcccccagctcccatgcatgcatgcacccacatttggccatggctagatgccttgttagaactataggggatagaggctggggctctgccaagcacagtgctcagaaatggggacagtgtcactgttgagaaataatagacacatagatggatatatatcttcattttttttaatttaatttttttcaaaagatagcacaagtatttaaggaaccttgtgtttcattgttcaggtctgtcagcatgtgtagtcaggtgataaaaaaaactctttcaaagccttgtccctccatatctgcttttgaaagtagagccttactagtcctcttattctgagggcctggggggaaggactttgggtatatgtgagtgccatatcttttctgtaacatttgcccgggttcctcttgaccttgaaggactttgtttattataagggtaggcttccatttatttctgctttctctaatcctgtgtgtggggactgaaaatgctcaagacaaatggagtcgaagaggaggtggcaggatgttggaattgcttttcatgatagagttgccttacaagctgttaagcaaaaagcctttgtgctgtgagtgttgtttacactgctccctgggctttcccacagcagcctctgtcttagctgtttctagggaaaatgttgagggccgggcgtggtagcacacgcctttaatcccagcactcgggaggcagaggcaggcggatttctgagtttgaggccagcctggtctacacagtgagttccaggatagccagggctacacagagaaaccctgtctccaaaagaaaaaaaaaaaaaaaaagaagaagagagaatgttgagcatttaatggtaactgatgctataaaacaaaattaattttattcaacttggaagaaaatgatataagaaggaacactgatataacatgctgtgtttatatggttacagactaaatgtaaattgaacgttgctctcgaggacctggagagatggcttagtagtagttaagcctagttgttgctcttgcagaggacgctggtttaggttcatgtggtggcctacagccatctgtaaacctagttcctagggcattgggtactctttaggcaccagacactcatgcaggcaaactctcaaacacattaaataaatctcaatacttttgatttttgaaaaatgctagtgttctcaagtttgtcttttgtatttctaccagatgattatgttaaaacgtatgctttctctctaaatgggtcctaataaactgtccaaatatatattttttgcttctgatatgtttgattaaatgatagtaatgttaataataaaaaccctatatatcagctgaactcaaaacaaccagaagagaatagtttgtttttttacttgtttaaaaagaagtccaggggacattccaggtctagagtgttagtcaaatgcccgagcctagcctcttaccatcagaatgctataccaaccatgacttgtggcgttctaaggtatcagatactggagcacatgttcattggtaacctctgaccctggcgccatggctgtctgtgagcatctttactttaccaggtgacactatgacaggcctgtcagctatatcaaaggctgtttagctaccatggtcctaaggtagatgcattgtagatgcatcagacctttctatctagtccaaataccagtcggcactaggtatcacttaccttatcttatgtgagacaagtcaggtgatgggaacaccttcctttacctgtctggcactccaccctgcaggccttgggttctttgtagcaccagggtccctccttcaaaacaggactatatcagcaattagtctgatcagcaagacttactctctttaacatcgtatctgttttccagctagttagaagttccaagagccaagaaactgtccctaagttacacaacacttctgtaatatctcgttagccaaaatccagtcacatggcaaattgtgcttcaagtctggggaggtctcagataagagataatggactcagccccaaatcgggctcctgtttatacacaatgagggctaactaagagattttgaaacagtcttgtgaaaatgctaaaaatagggactataatctcttctaccctcttaaaggttatgaaagaatacagtgttgtatggtaactggttctgggcttgcccctccctcctggtagttttgctaaccccactccccactcctttccaaagcaaagccaaccattctctcttcctttttttttaggactttccgtgacatctctgaagatctgaaatcttcagtagattgacctggcttccctgcagtgacttctggggagtctcactttgacagtgagtcctgcgagcgttggcctctgctctgtcagccgtgtctggcaggcaggggtacccagaaaagaagcagaagcagaacaccaagcgagagagaacttgctctcggccgcttcgcattttaaaacacagcttgagagttgagaactgtgtctgctcacagctcatgctaagacggcttgaaagtcgcagttcatgcactggtaccaaggcttgaaattgccctctttgattatctgctgcagtgtttatttataagttattttaaggattctggatgacctactattaagtgtatacccagtgtaatgctccttctgctgtaggagtttagcccttgtcagcgagaaggttttccctgtggagtatggttcagtaagcagaaaagggtaaagatggctccctgtgctgagaggagagaggatgcaggaggagtgcagctcttcctctcagccaggttgccagatttctataactcttctgaccacactgaaaagatgccaactgagctgctatgaatagtaacgatgtgacagatccctgccgtcagccttcctctcttacctgctttacaagcacagactgaggtgcagtggtccctggctttgtcatgtgtgccctcagttagttgcttagcagcagaatttcttcttccacttagcaccgtgccttgtacttgggagtctagacgaatgcttgctgagttggactataactttgcacgtatctcagatatgacacaaccggcatagtgttttatactttacacagcctttgtgcacattactttacacacatttcacatcagctctcggagctttgtactctggggagtgtcaccctggcggcgggggttgcggggctaagcttcaggacagcagcagtgcaaagccaccaagtgttgaaacttatctcctccttctgatgttacatctgcagaatgcatttcttatggctttggcagtttcccagtcctgttagcagaggttctcatttattcgatacatgtgaaagagttgtcctgcttcatgacgcaggacatggcgtcacttgagcccagctcctagtgttgagccctttccagctgttgttccagctgttgttccagctgtcctgggcagcagaaggggttttgatttgttttttgaaagcacttaagactaaaatttttcttaaaacttcttactaactttataacttgattgattaataaaacccacacatgctgggcggtggtggcacacgcctttaatcccagcacttgggaggcagaggcaggcggatttctgagtttgaggccagtctggtctgcagagtgagttccaggacagccagggctacacagagaaaccctgtctcagaaaaccaaaataaataaataaataaataaataaataaataaaccccacacatactgcagtgccatctgacttgctatgtatagtatggctcatgctggtttcctggttgtatcatgaatccttcaacattatgacctgttaatccatcatctgttagatctgaccactaaaccacttactctgttctttaataagttggtcatttgctcattaatacttttcttgagcattagtaaattctaggcaccatgccaaggaccacagggggctgtgggcgatgactcccacgatggcttctctcaccttaaatgccagccagatcatgtaaatcatactaaatctaaaattcttgcattaaaatggttgaggagagaaaccaagtttttgtttttaaactatattgtgataagtttataattagcacatgctcataagcagcaaatatacacagtgagtttgtatacatctacaaattatgttgctccagtgtgcttttagccatgtaaaagcaaatttgcaaaaaactaagtttgagctgattcatagttgttggtaggatagttctcaatttgaatgtgaatttctaggggaactctgagctctaagtttagagcttcctaaattagtggtaatggtataagtctgtcctgaaattttaagagcagaagtcccccaaaaactcaaactaccccattgctacagtgaatccaggaaggctgccagttggaaaaacatcctagcatgtgtcaggcacagggaagaggttttacggaattttcctaggacagagagagaatagataacatgaggtggtaagagtcttttagtccctaacataacttaccttgaagagtttgcgtagaatttgacctgggaagaagagaatatatatggctggtggctggtttggttttttgggtttttttttttttgttgttgttgttgttgtgttttttggtttgtgatgtgtgtgtgtgttcatgtgcatgtataggtagactttttggctactttattgggttcttttacctgcctctcttctccaccccgatcccttgcaacccccaacactaggtcagtgaggaaaggttagagggaaagggggcatagatctctttggactacttccttgtgattagggatgtcaaatttcctagaggaaagtccagtcttcattgtcaggacttctccaaccagcagaccagcaaaccagcaacacacacgcagcagcaggaatcagcagcagcctccacccccctcagggctctcagcagaccctcggattccaaaggtaaacgaccttcagctggcagaatcgtgcccctgcccaccatgagacgagtcatagtcagctgctgtggacaatctgaagcagccccatatcccacgcctggggttaaaactaaagcataatcacaaaacataactggggtttttcatataagaaaatttaaagctaacagagcactagttagtctgtctttacagggtctttactcttcctttttgttttattagcatttctttaaaaatgcaactagatctttctacaactgcttgtcttgtaggattgtgtgatatatctgtaatatgctttatattataatattcaaagaattgcttcatctcactgaagacatgtgagagggcattatcagtattaatttgtgcaggtgtcctccaaacttctgttatttccaataaatgtgcaattacagaaccagcttttcggaactcaaagcagttgcacattgggactgaatatgaatcgtgtatggtgtgcaaactgtagtgttagaaattctgcaaaatggaacacatcatctgtctgccagatttcatttcctttagcactcctaggactactcggcaggtaatgaagtttggttatacagagaataagtaaggcatttttttatctcctcggcttgttgccaaatcatagaaaaaaaatttaaactttgattgttaacacggtgggtttttttcatgaaattttgaggcttctaatacatttcccattgataattggtcaatttcttcatttccttgtgccaatagactgctcaacctgtatgagactgaatatgagtctcatattcaaaaatacaatggaaagtgtctatttctgattgccagttgcggttgcacaaataagattaattctgagccatccggaacaaattcagcagtttctatatacagaacaactctttctgcatactgagagtcagtaattgttaagagattcagagaaatctagcactagggttgcatacagctctgacttttgaacggaatttcgtgggctttgggtcactttgcttattttgtccgacttacagccttccattctcaacttacttgcatcaggatagaatgtaggcgcctcaggaactggccttccctttacaatacttgggagaatccaattagttctttttgtaaattgaagatgcttgctttggagatatttgttaatttctcccaaatagttgctacatgctttgcaaatcttcattgattacacatagtgacataatctcagcattagtaaaaggcaccacaattttggctgtgtctgttactgataattcatatagtcttattctaccttttataattaaatcagaaaccttttctatatatgtaagtttttaactttttactttgtgtattaagaaaatctatctataattctatcttccctttgtataatgagccacgtaagagaatgagttgatggcaaaaaaatgaaaatacaatcaagcttaggctctgtgtgatccacatatgcatcttgctgtgagtaaactctttacttccactgttaaccattctatactgttttaagtctgaatttacttgtaatggttgaaataagttacttgacgagttaatctggttgtaggccatagccaattaatatttcccattaatttttgaaaagcattaagagtttgcaactgatctctacagatctgtaccttttatggttaatattttataacccaaatagttaaccaaatctactctctgtattttacaggagtgatctgtaattcccagcatggcagaattctttgtgttttttaaaaacgttttctctaaagtatctttgtcagaattagccaacagcacatcatccatgtaatgataaataatagattgagggaattgcctacaagttatttctagctgttgttgctcaaaatactgacataaagttggactatttaacattccacttgggagcatttattggaccactattatgatcagtagatgctaagaaagcaaaccctttcttatcatgctcatgcagaaggattgtgaaaacactcttttaagtcaatcaatgtcataggctatgacctaggtcatgaagaaggtaaaggaattcccggctgtaaacgtcccaggggttgaattactcagttcagcattcttaaatctgataacatcctctattttcctgatttcatttttgtttttgtttgttttatttttttttcttttttgtaacaaacacaggcgaattccatggattgttagactctcctgtatggtaagcctccacctgctcttgtactagctgctcactgcctgcaggttttccccagttaagggccactgctctacccatacaggcttgtcagccagctattttagggcagggctgttgtgattcggaaacccagtccctggaacagcccgtgattgtttttgatgacacataccagtatctttcccaggaacatctaccatctccctaaagtttcatcatgagctgtctctgggattcaggaatatctgagtaccaaccatgttgttgtaaaagatcccttccccataaatttatgggtatgtcagccacataaggtctccgcttccctgtttgcccttctggtcctaacccattgtacactttgttttatttgaggtaatataccaattcccgtaaactgtatgaacattatgaagtggccattcagagttccacgattttggggagatgatagtcacatcaactcctgtatccaccaaaccttctatttcaacactatttacctaaagtttaactttggtcattaactatccactgtttgctaaagcacacgtttttcagtactcccaaatccccctgatctttcagctggagcagctttgcccttagtgtagggaaacagtagcagtttttaaaacttttattgtcccttgcattactttgcatctctctctctctctctctctccctctccctccctccctctctctctccccctccctccctccctctctcaagccacaatttaaatttcttctttgaaattcccatctataacaaacacatcactagtaagcctcaaccctcacattcttattcatccccaagatctaaataactttaaaagtcccacagtctttgcaattcttaaaatttcaatctctttaaaatatccatctcttttaaaacccaaagtctttttacaattaaaagtctcttaactgtgggctccattaaaatagtttcttccttcaagagggaaaaatatcagggcacagtcacaatcaaaagcaaaaattaaactccagctgtccaatgtctggtatccaactcacaatcttctgggctcctacaagggcttgggtcatttctccagccatgcccgttgtagcacacatcttgtcttctaggctccaactgcctgtattccactgctgctgctgtccttggtggtcatctcatggtactggcatctgcaaacactgctgtcttctgctgtaactatgcttcaccaatagcctctcataggctctcttcatggtgccaagcctcaactcctttacatgaccccttcagtcctgggccatcaattgcagctgaggctgcaccttcactaatggccttccatggcctctcacagtgccgagtctcagctgctctgggtgaccccttcatgccttcaaaaccagtaccaccggggtgacccttacacattaccaagtccagccacagcacaaggtacaaccttggctatctctggaacctgtgtgctctctgcctctgtgctctcaaaaaatacttcccagaagatgtcacctcaatgatgctggtctcttcttaatcactgctaatttttgctggttagctccagtgaaccagcatcagtagtcccagtaatgcaaagttctttaatcttccactcttctcaacattatcttcaaagctcctacacaacattcaccagagctcttaataccgaatggatcttctggcccaaagttccacagtcctctccaaaacatggtcaggttgtcacaggaataccccattcctggtaccaatctgtcttagtcagggtttctattcctgcacaaacatcatgaccaagaagcagctggggaggaaagggtttattcagcttacatcactgaaagaagtcaggactggaactcaaacaggtcaggaagcaggagctgatgcagaggccatggagggatgttccttactggcttgcttcccctggcttgctcagcctgctctcttatagaacccaagactgccagcccagagatggtcccacccacaaggggcctttcccccttgatcactaattgagaaaatgccttgcagttggatctcatggaggcatttcctcaactgaagctcctttctctgtgataactccagctgtgtcaagttgacacaagactaggcagtacaaggtttatctgtggtcaaatctagatcaatataagatcagaaatacttagttgctggttgttgttgttgctgttgtctttgttgttgttgcctgcttgtaatctcctggatggccagagggaaacactgtggggcctcaagctggcagcctcctactcctaccccttttcatttcctgatggcaagagattaccttgtgtgtcccttttggacctgcccttatctatccaatgagagcacttggcacaacacctgtaaactccgggaagcctaggtattcttttggacaacatattgctgccagaaacagtggcagtactatatttcccacagttaacaccaggcatttcattattgtgctcagaaagtatcatatttcttacagttatcacatggacattttgaaatctgaggcttttagccacttggtcacaatttctttgtaaatggctgaattcaccacaattaaaacactgggcatttttatatccgagacctagctatagcttatactatggtattagcatgatgtttgtgagagccaatatcagttgtgtcccttatccactcatccattggcactaccgcggctctaataatctaataacactttcacattgtgcattagcattctcaaatgtcaccatctttaacaacacctgtctggaatcagggtcttatatggctttgtttacagctgaaacaaatctttgcaagaaatctgtgaaggcttccccagagcttatataatcttagtaaatgtggctctttccttgggctcctcaactttgtccccaagctcttaaagctgccaagccacattgttctataatggcatcatcagattgaatgtgtattttgtagatcagaataccacccttcactaagcacttgatctttattcagtccccattctctacttcattgttcaacattccaggcttccttcctctaccatgttaaccatagtaactgctgaccaacctccagtacagcaccaatcccttccaatcttggggaataattctattttggatagcttggttacttaatctatcttttacataaggggaatgcattacataggaaatcacagactctttaaaatgcctcagatctatcatttctatagggtgacatgttatgattgtaaccagcaccattagcaggcatgtgctttacaatcactgggaaaacctgatggagattttgtaatccaagacctctcctctacccacatggctagcatgagattaaccctttctttcccaacgggctatttcagcttttcctgcatgtctccccagcccctggctggggggacttgaaactgaaagtgggcagtactgggcatgattggccttctatcctttattcatcctgctggaagctcctgctctcagtcactgcttcttgagcccttttgttcttgcctttcaggcgcttttcaagagcttccgcacagccaattctgtaaacctttcaaaaacaagtagaaggacccatttcatccttttttgtttgtttgtttgtttgtttgtttctccagttcctctgtatctacttgcagcttttccaattgctcaggcattcttccaactttgagacagaatataggaacaacaagaagaaagagaaaattccctctgggaacaaagcaggtggtagaccgaccagtggcagcagccataataaacttcttggtttgccaggggccagccacagcaaactgcagtttctggcacttagcatctcttcctaaaaacagcgattaagtaaatagcctttgtaatatctcagcaggaactgctgggctctaactttctgcctgctaatcaaaagtctcaggaagagtaagggacacttagaaaatgattatagcacttattactgagttgtaaaatgttgctcatgaaagttgtctaaggggaaaagcagaaagatcctaactggggaaagagaaaaattcttctaagtggagaaagggaaaaattctctactcttaagtggggaaaggcaaaaaattctctctctcctcctcatctcttcgtcctcagtacttatacatctttaagaatacatggctggttgtggtggcgcacgccagtaggatttgctgaaggaggcagaagcaggaggatcgcgagttcgaggccagcctggtctacacattttaaacctgggcgtggtggcgcacgcctataattccagaactcgggaggcagaggcaggtggatttctgagtttgaggccagcctggtctacaaagtgagttctaggacagccagggctatacagagaaaccctgtctcaaaaaaaacaaaaaaaaaacaaaaaacaaaaaacaaacaaacaaaatacatgatcacatgttacaaagttcacaagttcacaaaaaagaatcaaatcataaactgaattatacgtttacaacaaagaatgtctacatccattaggagtaattttctgactaagcaaccataacctgtctcagctccacaggttcactgaaggcttaaaaccataactaagttattagtgaagttttgtatcgataaacccatttttaaagaccgctttttttcttttttcttgctttttttttaaagatttatttattactatatgtaagtacacggtagctgtcttcagacacaccagaagagagcatctgatcccattgcagatggttgtgaaccaccatgtggttgctgggatttgaactcaggaccttcagaagagcagtcatttctcttacccactgagccatctctccagccccccccagtcaatattttatcttctttcctagcacctataataaatcgttagttccctttttatgacctttggttaattattttacaacctcttggaatatgttctaagaaggaaaagtctggttaccatgtaagagcagttagctggtgacacttgggaaactggcagagttcttattgtagttttgactattagaaaaggacctaatagcagtcctgctataaaagatcttaataatgacagatataatttgaggaatttttatagggtcatcattaagacttaagacattacctgtttgtctggatagcaccaccacaaggcagtacatctttgtagatttgcagacatctgctccaaaagggtgtgctattacttagtgattgttatatatgttaataataacaacaggaaaagcatattaatagcaggaatctctcctaaaatgaatccctcacagccttgcttaagaagggcacacctgttgcagactacataataatccaaagcaggccatttcaggatgttcacctgctagttattagcttggcccattatgactcctgacattggttgatgtcctggaacagaatatccattccttcctaccctcctgactcctctacggcattagaagcccagtttcccattctgcctaactccttgtctgggcaccacttgtaagcagactttttggctactttatacatgtgcatgtgtgtgcatttgtgtgtgtgtgtgcatttgtgtgtgtgtgtatgtatgtatgtatgtatgtgtgtaaccaggacctcattgctcaggagaatgcacccatgaagcaaaagtagctcagtaaaactgagagcagaaatcctccatagcatcttggattgaacagatagattatgggttaatttaccaatttctgtccgctttaagctgcaggatttgttcatcctgctaacaaatggggagctaacaagctgtgctcacccatttactgctgtttttgctacaagaacgaggtgcaggtctggaagtgtaagttccatgttctgcacattctgcctgatctctcactcttatttttagcagttatgtgccagcctctttggctgccaggattagataataaatccgtgagagtcctgacccttcttccctgagaaccagctgctttcctttgggctctgagatgagcctgggttggaaagtggtgaccaagatgtgttctgtagaggccctgtgtccaaactgtggctttgggcatggcagctgtttgtaccagtgtacaggcagcaaagcacttgtaggaaaggtcttctagctaaccttggccttcatatagaactcaccatgctctcgggacttcagcatttctctgtttcccacttttctaggtgactgagaagtgtggcaagaagtgctgggaccttcaggccaataggtttagactagaatacatttgtttaggtggtatcctgaggttttaccctggtgtatggggaaatactttccatacgccagtcctacctaaccttccagtatcttctgagggcctcccacagcctttcccagtgggactttgcccttttcacagtgaagattgcttatggcaatatactcccaaatttttgttcctgcaaagagtaactagtatttattttctatttatttatttatttattttatcagtttctagtctttgctcattatgctatcaaatctgttaactcactaaggtctggggaaaaactaatatctgaacccatgaaacagccttctcaatagcttaagacgacttggagaattgtaggtagagtcttctcaccagtgtcacaaaagcttggtgcctggaggggctgttgtagtcaggttatgcctttgttttagacaaggaaaccaatgtgtgggtaaagtagcttacgcagcagccagttagcaaccgaattcagatggaacaggtcctctccatcagcctgccttctgctcctcctgtcttcctcacggctcagtcacttttgtcacacataaata

SEQ ID NO: 845 - DNA, 3104 bp, Mus musculus
ccaggcagaggcgcgatggccgaccgcggcggccctgctgaggcgcccagcccgcggggctctccccggccagagtcccgggccccgcgcacggtcgggccgggcgagaccccgcgtaccgcggcgctggcgctgcgcttcgataagcccatcaagcaggctttctacaacacgggcgccgtgctgttcgtgtgcctgtgctgcggcgccgcggtgctcgtgtacttcatcctcgaggccttcctgcggccgctgctctgggccgtgctgtgcggcactttcctgcacccgttcaagagctcgctcacgcgcctgggccgcctgtggctgcggcgcctgcaccgcgcgcacacgcccatcgtgctggccgcgctgctgctgccgctctgcttcgccgactacggcgtggaggcgctgggcgagcaggcgctgcgccgccgccgcctgttgctgctgctgggagcgggcggcccgctgctctatgggctctactgcctgggcagctacctgggcgtgcaggtgctgctggcgcacgcgggcgcgctcatctgccgcggcctcgactacttcagcagcctgtggatctggacattggtagttggctacgtgctgatggtttcattcaagtggaatgcaagcactcaacggtatttgagagcagtttcgattcctgtgtggatgatactgctttttcatatagcatcactggctggctcatggagaattccagtattcctggttattgttttcctgatgtctgtgggcaccctttatgaaaaacagaatgagaaggagtcggctggggcagaattaccaggacaagtgatctccatggcagcttctactcttgcaaacttggccatctccatcactgggtatgagtccagcactgaagaccagccctctgaccctccgacagtctggatcatcaaaaagctcgtgatccactttggagtggtgggcttcctggagaaacgctgccgcgcatggtggcaggtgattgagtgcttcctgaaggagcggcaggaggctttggcaccttggccgattatcgggcttggaaagttcttactaaaagttgatagcaagatgatcatctggttggagaagatgttagataaaattattagcattttcatcatattcttgctagtcataggaacccttcttttggcccttctcctgactgcaaaggtacatcaggagagtgttcacatgattgaagtcacaagtagtctgattaacgaaactctagcaaatcacccagagtgggcaaattggcttcctgaggctcaggtggtccaaagagctcttaattcagcagcaaacaatgtgtaccagtatggacgggaatggataactcacaagcttcacaaaattctaggagataaggtgaacaatacggctgtgattgaaaagcaagttctagaactgtgggacagactgtatcactcttggtttgttaagaacgtgacacactctggaaggcacaaagggcacaagatgcatgtgagccgtcagaacagctggctgggagatattttggactggcaagatattgcctctttcgttcatgagaacatcgagacttttctttcgatcctggagtctctgtggattgttatgagccggaacgtgagcctgctgttcaccacagtcaccaccctgctgaccatcctcttctacagtggcactgcccttctcaacttcgtgctgtctctgataattttcctgaccacactgttttatctgttaagttccagtgatgagtactacaagccagtgaagtgggtgatcagcctgacaccactttctcagccaggcccttcctctaacatcatcggccagtctgtggaagaggcgatcagaggggtgttcgatgcttccctcaaaatggctggcttctatggactgtacacctggctgactcacactatatttggcatcaatattgtcttcataccatcagctttggcagcaatccttggagctgtgccatttctggggacatattgggcagcagtacctgccgttctagacctgtggctgacacaagggctaggatgtaaagccatcttgctcctggtctttcatctcttgccaacatacttcgtagacactgcaatctactctgatatatcaggaggaggccacccctacctgaccggcttagcagtggctggtggagcctactacctgggcctagaaggagcaatcattgggcctatccttctctgcatacttgttgttgcttccaatatctacagtgccatgctagtgagtcctacgaactcgatgcccacaccaaatcagaccccttggcctgctcagactcagcggactttccgtgacatctctgaagatctgaaatcttcagtagattgacctggcttccctgcagtgacttctggggagtctcactttgacagtgagtcctgcgagcgttggcctctgctctgtcagccgtgtctggcaggcaggggtacccagaaaagaagcagaagcagaacaccaagcgagagagaacttgctctcggccgcttcgcattttaaaacacagagaaaccctgtctcagaaaaccaaaataaataaataaataaataaataaataaataaaccccacacatactgcagtgccatctgacttgctatgtatagtatggctcatgctggtttcctggttgtatcatgaatccttcaacattatgacctgttaatccatcatctgttagatctgaccactaaaccacttactctgttctttaataagttggtcatttgctcattaatacttttcttgagcattagtaaattctaggcaccatgccaaggaccacagggggctgtgggcgatgactcccacgatggcttctctcaccttaaatgccagccagatcatgtaaatcatactaaatctaaaattcttgcattaaaatggttgaggagagaaaccaagtttttgtttttaaactatattgtgataagtttataattagcacatgctcataagcagcaaatatacacagtgagtttgtatacatctacaaattatgttgctccagtgtgcttttagccatgtaaaagcaaatttgcaaaaaactaa

SEQ ID NO: 846 - protein, 778 aa, Mus musculus
PGRGAMADRGGPAEAPSPRGSPRPESRAPRTVGPGETPRTAALRFDKPIKQAFYNTGAVLFVCLCCGAAVLVYFIAFLRPLLWAVLCGTFLHPFKSSLTRLGRLWLRRLHRAHTPIVLAALLLPLCFADYGVEALGEQALRRRRLLLLLGAGGPLLYGCLGSYLGVQVLLAHAGALICRGLDYFSSLWIWTLVVGYVLMVSFKWNASTQRYLRAVSIPVWMILLFHIASLAGSWRIPVFLVIVFLMSVGTLYEKQNEKESAGAELPGQVISMAASTLANLAISITGYESSTEDQPSDPPTVWIIKKLVIHFGVVGFLEKRCRAWWQVIECFLKERQEAPWPIIGLGKFLLKVDSKMIIWLEKMLDKIISIFIIFLLVIGTLLLALLLTAKVHQESVHMIEVTSSLINETLANHPEWANWLPEAQVVQRALNSAANNVYQYGREWITHKLHKILGDKVNNTAVIEKQVLELWDRLYHSWFVKNVTHSGRHKGHKMHVSRQNSWLGDILDWQDIASFVHENIETFLSISLWIVMSRNVSLLFTTVTTLLTILFYSGTALLNFVLSLIIFLTTLFYLLSSSDEYYKPVKWVISLTPLSQPGPSSNIIGQSVEEAIRGVFDASLKMAGFYGTWLTHTIFGINIVFIPSAAILGAVPFLGTYWAAVPAVLDLWLTQGLGCKAILLLVFHLLPTYFVDTAIYSDISGGGHPYLTGLAVAGGAYYLGLEGAIIGPILLCILVVNIYSAMLVSPTNSMPTPNQTPWPAQTQRTFRDISEDLKSSVD

SEQ ID NO: 847 - DNA, 121160 bp, Homo sapiens
aatctggctccaggagtattaatatacttttttgagactgtctacaaaatactattttgtaaaaactatgcctttacatagacattgataggttatatttgttttataacaattgtgtacctaatgtttgtgattaattttgagatttatgtatatttataagcctatcttatgtaaatttttactctaagatgtgtggcacattactaataaagacgtggatttctatttatgtaaagtaattgtagcaatattcctagatgctacctaaatgattgttctgtccatttgccatcacaaatacttttatctttggatgattatgttagtcagaatatattaattagatttaaactttaaaataagaattacaacatagtttgaaattcttcctgttgatgtaattaaagttagtttataattccttattgctttgctctggtgcatttttcttttctgtttctggttttaaatctttcatcagtaaagtcactctcatttctccctgaatctatagaccttggagaagacgatagcctgtcttgtctgacaaagaggaaaatcattttgctgtcatcaggtaaaaattcccgtagagaaacaatctgtaaaataatcttacatttatagctttggtttaatactttattaggtagtgaatggaggcctataatcccatttcaagtgtatcagttggttaattgcacatggctagctctaagaatttcaataatcagcattattggcaactaaaccatataatattttgagaataattagagtttagttgtagagcataatgaatcaccagggaggtcgttgagctgccagtactacaggggctagcttgagaagatcaaggaatggcatgttaaaaaagaatcaggcattaccacattctgcattcaaagctctaattttcaccaaaaaaaaaaaattcaaatattttgtcctttgtttagtattctgcttgttccgtgtagtatttattttgcagtatcctgagtggacagcccagctatcaaatctgatcctggctaatgtttgacttggagatttcttagggctcagtcgcaggtacaaggatcagatgataagctataagaagagacagaggaactgcaatggacatgagagccacctgcgtccaggaggttaagaagctttaaccattcattcattcattcaatcaatcaatatttatttatttatttatttatttattatttttttagggtctttgtcacccaggccagagcgcagtggcacgatcagagcttactgtagcctcaacctcctgggctcaagcgatcctcccacctcagcctcccaaattgctgggattacaggtgtaagccactacacccagacaataaatatttatcgaagactcttatgtgctcgtccttgtgctagacattacacagagaggactctaggaagaacagttcttgatttctgcccccaccctggggctcaccctgggggcctgtttggagagtcaaacacacaccatgacagtaccttgtggtgaattcagtggtaaggaaaagctcaggtctgatgctaaacctgagtggaggtcctcacccagcctggggcaactaggaaagcaggtggtgatactgaagtgaaccttaaggaaggggtgctgtggactgaacatttgttcctcccaaattcatatgttgaaaccctaatccccaatgtggtggtatttggagatggagcctttggtaggtaattgggccgtgagggtagagccctcatgaatagcattagtgtccatataagaagagacaggagagaatttgcttcttttctccactctccaccatgtgagtacacaatgagaaactggccatctttgaaccaggaagagggccctcaccagaacccaacaatgctggcgcctgttctcaggcttcccagcctccagaaccatgagaaagaaatttttgttgctgaaaccagtccgtctgtggtaatttgtgggagaagcctaaattgattaaaacaaaggggtagaaatatgttaggcaaagggtgtacaggggcatcaccaagaaaggggagaacaacccaacagcctcagacgaaagaccagcaggatgtattctggaaccattgtcatctgacaaggcttatcttagttttctattgctcctgaaaacagtttccacaaacatagtggtttaaaactacagaaatacattttcatacagttctggaggccagaaatctgaagtgaatcttacacagctaaatttaaggtattggtggcggggcccagtggctcacacctgtaatcccaacactttgggaggccgaggttggtggatcagttgaggtcaggagttcgagaccagcctggccaacatggcaaaaccccatctctgctaaaaatacaaaaaattagctgggcgtggtggcaggcacctgtaatcccagctactcgggaggctgaggcaggagaatcgcttgaacctgggaggcagagtttgcagtgagctgagatcgtgccactacactccagtgcaggtgacagagtgagactccatctcaaaataaataaataaataaaaaataaatgtaaggtattgacagggctggttccttctggaggctccagggaatagaattcattccttgtgtcttttaggttctggtagctgaccaaattccttaggctgtggcctcatcactccagtctctgtctccctggtcagatgaccttcttttcttctgtagtctaatctccctctgataaagatacttgtgattatatttagggcccactgaaataacccaggataatttccctatctcaagatccttaattatacctgcaaggtgccttttgcaatgtagggtaatgcttcataggttccaggaattaagacttggttacctttgggggtcattattcctagcatcacaaggccagaggataaaggatgaagtgaggatggggagaggtgaggcagagtgagcagggtcctgttcacagaggaccttgcaaatcatagtaaagaactttgacaccttctcacaggggataaggaggcttagggagagactagcttgtgttttagaaggatcatgctggcttccatgttgactggagtggagcaagaggatgagcttaaagactagttagaggcagaagtgacatcagtgtggtgcagagtgtacaaatatgtagcacttagaattcaaaaccagcaggacttaatctacaaataaagatggtttctttacacataaagaaaaattagtctggcccagcgtggtggctcatgcctgtaatcctagcactttgggaggccaatgctggaggattgcttgagcccaggagttggagaccagcctgggcaacatggcaaaaccccatctctaccaaaaatacaaaaatcagccactttcataattaggtctcaaaataaataaataaatattttttgtttaaaagaaagattaggcagtttttttttcaagatagaatcttgctctgttgcccaggctggagtgcaatggcacgatctcagttcactgcaacctctgcctcctgggttcaagcaattctcctgcctcagcctcccaagtagctgggattacaggcatgtgccaccaggcccagctaattttttgtatttttagtagagacagggtttcaccatgttggctgggctggtctcaaactcctgacctcaagtgatctgcccgcctcagcctcccagtgctgggattacaggcatgagccactgcgcctggcctagtctgggcaatttgaaatgcatcaaccatctcctgtttttcagtcttgctcaggtttgcagcagaaggctggttgtttattccactggttggcctcagccttagtgtgagtatatcgtagggaatagagctaaggaagcaatgggctaagaattccaaatcctgagccctaaggcttaaacttcaactatccaggtaaagcttgagccattcctgtgaagagggggaacgaccagtgatggacactcaaggtcagccactttctagagagggaattctgactttcggtgcataattgttcgtcgcaaagtcccgcttgcaatgcccatccttcacaccaaccttcttcccaccttaggaagcgaaggaggtgtcttgttgcagacttaaaaaaaattatgtatctctacacttcattttattcatctggccctctcccaggcacgtcagtttcatcaaggttggttgaattgatttgataagcttttcactgaaacatttcactaactggtaaatcgttgacatggcacgacattgtatgggaggttagttgcagctggatggcacagaccaaaaggacaggaaaggctacccttgactcggtgaactagcaggacctgcactgtgagtaggggccacatgtccagctatgggagtgggagggatgagggggaagtaggtagggagttaggcaaggcctgttgggatcagacttgcttgcaccatttatccttcagccactgagatttttaaaaaatcttggcctgtaattccaacacttttggaggccaaggcatgcggattgctcgagctcaggaactcgagaccaacatgggcaacatggccaaaacctgtctctaccaaaaatacaaaaaaaattagccaaacgtggtggcatgtgcctgtggttccagctactagggaggttggggtgggaggactgcttgagcctgggaggcggaggttgcagtgagctgagatcgtgccactgcactccagcctgggtgacagagtgacactctgtctcaaaaaaaaaaaaaaaaaagagaaagaattcagtgatagttcagtgatagattaataatgtttgccatggacttagcaaaggaaagtagtaattcacatgccatgcaattgccagccttggtttatagtaattgtaataaaagaccttgttataactattccagtagtcactgtttgaatttctattgtaaagtaaccatcatagctgggttcagttcatggcagctaagtgctgtgtataaagcagcccaagggaaggtaagtaatgactactctgtggccaagtaccatattagttatttacataaactagttctagtcctcacaacagctctgcaatgtagatttcttatctctcttgtacaaatgaggaaacattctcagtaagttaatttatccaagggtatacagcaagaaagcagtagagccaggattataatccaaatctgtctgccttaaaagcttgtgttctttccagcacatcctgcagcctctacaataatatggtgtctactcactttttttaattattaaaaaaaagtgtgcaaagtactggagcaaatgcaaaaaagcttatcgatgacttttgatccaatggggaattcagatatttgtgaaaatgattacaatataatgtggttggtacttgagaagagatagctgtaagtgctacacagtaaaggtagctgctaagtttccctggatcaggaaaattccacaaaggagatgattttgagctgaggcttgaaagatgaatgggaattatccagataggcaagaggagagttatatatctggaaggctggtcctatgaagatagaagagatgtccaatgtatggttgttggtctaaggagctcaatgtgctcttggcagttgttgcacatctgtacgggatgccaaatgtaaatagtgcccccaaatgtgaattgtatccctggaattgcgcaaagtggtggccctggaccatggagagataccacaatgtcctgggtagagccttgctctgtcgcccaggctggagtgcagtggtgtgatctcagctcactgcaacctctatctcccaggatcaagcgattctcctgcctcagcttcctgagtacctgggattacaggcgcccactaccatgcctggctaatttttgtatttttagtagagatggggcttcaccatgttggccaggctggtcttgaactcctgacttcaggtgatccgcctgccttggcctcccaaagtgctgggattacaggtgtgagccaccgcgcctggcctctgggtgtttaatatatgttattctccaatttaatctttactgccaccttatgaacaaggatcatgcaccatttatagctgaggaaactgagctcagagatgctatgtaacttgtccaggattatacagataataagtggcagatttggaatctgaatgcatgtcaccctgatttcattttcacatgatcacttcttctgcattgtacatactaccttacacacaacgcacataccacattgtaagcactggactttgtacaaagcagatactcagcacaccttagtaaatgtttgtggatacacttggagagctctaaaacagacacaatgctggagaatcgtctccctgcctgtgtttgtaatatctctggtggatgttatcttgataccttgggagtatcagttgtttaagagataccccttatcttttctaggacaaaagtaagagttaccccaagagtcactgtcagattctcaccatgtcagagacactgtgctgctgcttttatacatactttcttatttcaccttcacagcaaccatttttataaatcaggaagctttctgtttcaagtaatagaagcctaaccaaaactggcttaaatgattacaaaattcattcattcatgcaactggaaagcaagaggcagtgtggtctccagggtcagcttgatccacgactctgaatgtctttcacttctactgtatcctgcgtgccgatggaggctgtttgtccctgaggttgttggagtgagttgtcatgttaaggtcaacagagagaacccaagtagcctcgtattttggaggagacacctaaaatcatatgaccttgagatttgagtggacaatgggcttctttctcaaatttagtttttaggtcctatgttccagtattttaatttttctctgttctcaaccacatggatgctcagtagaaacatccccagctttcaatttcatctctcgcaggaagcacagacaggctttttttgaaaggacgccactcattcattcttttgctcagcaaacacttagctcctactcagtacgtcctatgctgtgccaggtgctgggcccacggaaatgaagaaagcccagtccctgctctcaaggggctctgtagggagacagacacagaaaccactaactttgactgcagtgtggtgaggacaatcacaggaggggtgagtgaaaccctgtgtgaacccagccttgtgctaggccacataaagactagtctagttagattctagtgcttcagccttcatttctgttagagttccattgactagaaatgctgagtgacacctgtcagtcctacggctttggccattagaacaatcttgaaatgttcagcaattttcactttcactgagacttggaagcaaagcaccatgacagggcatttttttgatttgctgagttgttgctaaactgtggcccaacacaatttaggcaggattaacaccccatgtcctgtcccgtttcggcttgcatccactgataaatgcttctgttgcgtaacttgggagctctcattttgtaactagaggaagagagtctttggttggagtaggacagagaggagggttcagtctttgttccctcactgacccattggaagggttttgaacccatgtggttagaggactgaagtccagacatggaaggaactattcacgagaggagttataaacactgggcattggcggggcactgtggctcatgcctgtaatcccagtactttgggaggctggggtaggtggatcacttgaggtcaggagttcaagaccagcctggtcaacatagtgaaaccccgtctctactaaaaacacaaaaaattagccaggtgtggtcgtgtgtgcctgtaatcccagctactccggaggctgaggctggagaatcgcttgaacccaggaggcggatgttgcagtgagctgagattgcatcactgcactccagcctgggtgacagagcaagactccatctcaaaaaaaaaaaaaaaaaaaaaaaaaaacccaaaaaactaaaaactaaaacattggcacactgacctgctttagggcttgggtgacaaaatatttgtcaagtgagggagaaagacttcttccccttatcaggattaaacccagctctgttttggtaccttgagggttagaagtttgggagtatgtaggatttggggataatgatacaggcactggaaatcttccgatgggcactagactcagtgagctgtgtgggcagcagggtggttggtagcagctgactcatgtctctgggtatatgtgaggtaccccttttgggacccccccatagaaatcaccaaggactttttaggaaggaggttgaggcctttgctattatgtagatgggagcttaagtcagtgtaacatggactgaaggcaaatgtgaccatactttgtaatcataatcccagaaagcctgaacaaataaagaagcaaagtacaatgtaggaacaactgaaagaaaaatatttacagagtcaaactgtaactgagtaccctcattttttctgagacagagtttattttttctttctctcttcttttctcactcccccagtttctcccttcctacttagccctttaaaaaggcaaatgtaggccaggtgcggtggctcacgcctgtaatcccagcactttgggaggctgaggtgggtggatcacctgaggtcaggagttcgagaccagcctgttcaacatggtgaaacctcgtaaaaaaaaaaaaattagccgggcatggtggggggtacgtgtaattccagctatttgggaggctgaggcaggaaaatctcttgaagccaggaaatggaggttgcagtgagccgagatcgcaccattgcactctggcctgggtgacaagagcgagactccgtctcataaataaataaataatttaataaaggtaaatatagccttttacgttgtcttcaccagacagtccctacagggcaagttcatctaactatgtgcttaggagctccagaaaggaactcaagagataacatccaatttctacaaaactccctcccaccgggagactgccttgagaaatatgaaactctcttccatctgaggggtttttggcttagtcctgccaacgaaggtgccagcagtcaccagcttgaccacccagtagataaggcatgcagacccctcccccgacaactgcttgcttccttcgctttaaaagtgcctgctttctgctccacaattgaagcagtagccttagggaggaaacctgtacttcttcccctaagctagctttggaatacatcactttctttataccagaccttgctcttgttaattggaatctgcaagtggtgagcgactaaacctgcgttttggttataaaactccaaaggccatctgaaatactgagacctaaaacttacaatcgagatggatagggaattactttttcctttacttcctttactaaatccctttgtctccaaatctatcaagcaatagtttctttatctgcaaactgtggattatgttacctgtcttgtctgctttagaagggaaacaaaaattatgtagaaattaataggaatactattgaaacaggaaagggacaacttgcaaggtttgaagcaatcacatgttgagtactcagtcaaggctttctttttttttttaaatcaaaatgttgattgggatattttatgggtagcaggcttggatcccagcacttttccaataggggaacagaagcaccttgtaccgccccagagtttcccttcccccacacaataaccctaaagcaaaagctattattattatcatcgccatgtgacagaggaaaacttgagattgggggcttaactgacattacatcaagtctcaaaaagaaacagtggcagtttgagactttgatctacgactcttttaagagtttagattgcgtccacagcgaaacctgcacaaacagttgtcaacagcggctgcaaattacaggcttatgaggaacgtttgaaaaatgccaagagttctttcctcaggccaaatactatggtagataaaagtatagcctttggagccagaatccctgagtttgaatcttgcctgtgccacttggtagctgtgtgactctggctgcgtacttaacggctctgtctcagtttttctgttggtaaaatgaggataataacaccttctttgtagggttgttctaaggattaaatgagttaataggagtgagccacttagaatagggcctgttatatggtaatctctatttaaaatcctgtcagatacaccaaagaaaacactttaaaaatatctgttaaataaatcagtaaaacagaatcggggcattggttctttaaaagtactcccccacggtattctagtatgcagcttgggttttaatatctgaatgtggcgccttttgggatctcgcctcgcgagaaattgacattaacgaatgagtgaaaggagcttcccccccccccccctccaggaagatatagaccctgcaaacttgttagcaggaccttgcggacaccaaggaggcggaggcgttttccccatttccccttcgggagttgtagtttcctgcaagcgcttggtgggtctgtaaaccagcggggaactacaactcccacaatctcgcgcgcctcccgccctgcctcccgcccgcgtttctagcccgactcccattaccgcccctcgggggcggctgtggcggaggaacgatggccgacggcggcggccctaaggacgcgccaagcctgcggagctctcccgggccggcgccgcgggtcccgcgcgcggtcgggccgagtggcggtggcggggagaccccgcggaccgcggcgctggcgctgcgcttcgacaagcccattaagcaggccttctacaacaccggggccgtgctgttcgtgtgcctgtgctgcggcgccgcggtgctggtctacttcatcctggaggccttcctgcggccgctgctctgggccgtgctatgcggcacttttctgcaccccttcaagagctcgctgacgcgcctgggccgccactggctgcagcgcctgcaccgcgcgcacacgcccatcgtcctggccgcgctgctcctgccgctctgcttcgtcgactacggcgtcgaggccctgggcgagcaggcgctgcgccgccgccgcctgctcctgctgctcggcgccggcggcccgctcctgtacggcctctactgcctcggcagctacttgggcgtgcaggtgctgctggtgcacgctgccacgctcatctgccgcgggctggactacttcagcagcctgtgggtgagtgagcggcagtccgcccccgtcccccgcccgtggtcccggcgctctggggtgcaatcctgcagctgttcctcccggtgcaggggcgacgaggggccacacctgtgctgcagtgaccgtccgtctccgctttccttctcacacctcaggaatttggcggacattcttccaaaaagggggcgggcgtgatttgaaacagcctccctgcttttcgccttgtttcaatcctaataggccctcttagggggacagtgccctggattgagaatcgttatttcgctttgcagagagaggcctcagagcatggcagtggggcttggttttacttctggttggagagggcgggggtgcttcggccaccctcagttctgcgcatctgaatgtcagagctggaagggaccttagagattctaggccaacttgccatcctgcagataggaaaggtgacctcttaccaggctagggctacttagggacaaagaggggtttgggtgtcttagatttcttacaagtcctaaaacaaagcttgcttcactggctggtgctgcctctcagttcaggtgattcctgtataatttgtgcaaggcactgggtgctgagctgcctgtgcttcttcctctccacgctttacttttaggtaactgcttttgttgtgcagggactggtgtaccacagcacacctcctcccgcctggagtaaagcagctgaccgcgtgaaggggagagacgtagatttgtgatgcttggattaacctgagcttactcttacaaaaccagggagctttagaattggaaagatttcaaaggtaatctagtgacacaattcctaactcagactatattgtggactagttaattatccacatatttaactggagactgttaaaaacaagtggagatttagtgcgtaagaatgccaattgattcataaacagtaccatttacaaattgattcacttcttttgtcagtgaaataaagttcagtgtaccttgacgtcattaagttggaaaatattaattccccttatctgtctagcggtgttttggcttgcctgaggttattggcagagtgatgaatgacccaaaacacccttcttctcttgttccctcaataccacctcttggttcatgtttaaagttgatcgagcatatgttaggtgttgggctttgtgagaggtttaaaaaaggactaagatacaggtcccgtcttcacggtacatataatcctatatgaacatattctaatggagatgacagacatacagataaatgttcatgactcatccgttgtgggccacaggcccagagaatgtgattggtccaaagtcacacagctcatgagcaaatctgtggttcacttttatggaggcccagttcagcgctctttatcctttatcttgcagtttcacaattcagttaagtggatcgaatgcttcttagctagaaggcagaacactatgttctaagaaaaataagcttggttattttcctgaagaaattcagttttgtcaaagacacatttatagattctgctaacatttttgactgttgatactgctcaaggagcatatccatcaaactataggaaagtagaaaagaaaggcctgccacatgtaaatagtatattttcatgctagagtaagaagttgaatacctaagtaatttggcatgattatgaggcatttctaccagtctctctcagatactcagtggaaagagttgagcacttgtaaagaaacatccacagctcggcgtatacctttgagtatctttttactgaagataaaccctcatctttgtatttcatttgtgggttgtggatgagtggaagagaagtaggggccaacactgattagacctgggagtgggagaaagaaggtcaaactaattaatgattttttaaaagcttgaaattggccgggcgcggtggctcacgcctgtaatcccagcactttgggaggtcgaggcgggtggatcacctgaggttaggagttcaagaccagcctggccaacatggtgaaaccccgtctctaccaaaaatacaaaaaaaaaaaaattagctgggtgtggtggtgggcacctgtaatcccaactatttgggaggctgaggcagaagaatcacttgaacccgggaggcagaggttggagtgagccaagattgcaccactgcactccattctgggtgacaagcgtgaaattccgtctcaaaaaaaaaccaaaaaaaccttgaaattcagctgtttggctcaagtgttgggagcaaggaaaaagagagagggttaaaaaaaaacaaactcaacataaaagtatgagttaagtatttgtgagtagggagtggtagaagggctaaatttgaaagaaccttcaggtcaatctgagtttaagaaaaacaaggcatggaattgcattctgctcaagcagcacttaaggatggatggttggatgggggtgaggtgtacttgagaagacaaggagtccttgctcttatccaaaagtgctgattaaggccaggtggggttgcccacgcctgtagtcccagcactttgggaggcccacacaggtgaatcacttgaggccaggagttcgagatcagcctggccaacatggtaaaaccccgtctctactaaaaatacaaaaaattagccaggcatggtggcgcacacctgtggtcccagctactcgggaggctgaggcaatctcttgaacccaagagttggaggttgcagtgagttgagattgtgccagtacactccagcctaggtgacagagcaataccctgtctcaaaaaaaaagaaaaaaaaaagtgctgattaaaggccaggcacagtggcttaatgtaaccccagcactttgggaggccgagggaggaggattgtctgagcccaggagtttgagaccagcctgggcaacatagtgagacctcccccacccccagtcttttaaaataagaaagaaagtgcagattaaggcctggcattaagtgaaagtaggttatgtgactgggcaggaggcccactctggaccttttccatcccacagttcacagcggtttggctttatgagcccaagcagggctgtctggttatagaacatggtctttatgctttctaggctactttaaccatgagcctgctgctgaagagcagtatagatgagagaggcagagagaaaagttacctttaagcgaatccctgttttgatgacttgacagttcatccatttaagatccaacttttgagcatctgccatgtcccaggcactagattaggttcttttacatgggtgttatttcattctctcaatgtcttatgagctaggagggagggatttcatatgtgagaaaactaattcagagaactgttgatgctgtcagtaaatggcattcaatagacctagcagcagttgaagtcctgctgttatcaaaactctgtagtaaccttcaataaggatttttaaaaagttttccctaatacattgtgtttaattatttttagtggattgtaggccaggtgcggttgctcacacctgtaatcccagcactttgggaagccgaggcaggcagatcacctgaggtcaggagttcgagaccagcctggccaacatggtgaaaccccgtctctactaaaaatacaaaaattagccgggtgtgacggccgactccataatcccagctactctggaggctgaggcaggagaattgcttgaaaccgggaggcagaggttgtaatgagcccaggtcgcgccattgcactccagcctgggcaacagagtgagactctgtcttaaaaaaaaaaaaaaaaaaaaaaaaaagattccagttactaggaaaaaatcagaaaaatatcagcattctagtcatctagaaaccttattcgtccctcttctttcttcccttttatttttatatctatgcagttttccaggtcccatcaattttcctttttagtgtctttgggacctatgtttttcttttttcttcttatattttgagacggagttttgctcttgttgcccaggctggagtgcaatggtgtgatctcagctcactgcaagctctgcctccccggttcaagcaattctgcttcagcctcccaagtagctgggattacaggcacccaccacgcccggctaatttttgtgttatttttaatagagacggggtttcaccatgttggccaggctggtcttgaactcctgacctcaggtgatccaccttccttggcctcccaaagtgctgggattacaggcatgagctactgcgcctggcctggacctatgtttttcttcgtcactagtttttctttccagttcagttcctcttcatgtcacttgtagatttcttcagtctcctaaaactccgtgcttcttacaagtgaaacactaatcatttatgggatgagtaattctttttcagcagtttcaaatatgttaggagattgcactgacttagtaagtgatttcagaacacctaaaaaaaaaatcagctgttgcaccaggttcacatgttactcagttcttggcatcttcccatggtggagctgtgcaaggtaaatttgaaaaagctgatggcgtgccctgctccaccattcctctctgttggggggcattctgatcttcctcattctgttaatttagacttggtggagaatttgaagaccatttagttttttgcagtagtaatagatttgttttttctgtggtctctgatcccattgttcccatctttttaaagaagcaggaggtggagagagtagtggctgaaagataaaaacacctgaagttctaaacttggctctgccagtaactaactttgtgaccttgggcagaccagggccctcctctgggacattcagtcccaattgcataaagtgaggggttggcttgaacaatttctaagatttcacgatgttctattttacacatcacaagaggctcttcagcagtggacgttagtcagccattcactgctgacaccgttctacttttaaacacatttctaggtttgtttctgcttgcctggcagcaagaaacaaggagaggaaagtttctagtgcttagttttctcagttaaagactttgaatataaaaatgttgactctaagttgccatatgacaaagagaatggttttcacattagaattaagtggataatttaaggacctgaagcagttgctgcttgaggctatgattagggctgtggctccataacttgggaggaggtttgtagttgtggtgtttttgttttgttttgttttggggatggatttacgctcttgttgcccaggctggagtgcaatggcgcgttctcggctcaccgcaacctctgcctcccgggttcaagtgattctcctgcctcagcctcccgagtagcctgccaccatgcccggctaattttttgtgtttttagtagagacggggttccaccatgttggccagactggtctcaaactcctaacctcaggtgattcccctgccttggcctcccaaagtgctgggattataggtgtgagccactgcacccttcctgtagttttattctctctaaaaaaagcttgggaaactgttctgcaaaaatatgtaacagaagcaaccaagttgtttttccagttaatacccagatgacaataaatgaaacaaagatggttgaaaaggcagagtctctacttaatgttttctacatttaatatgttttttaaccagaaaagtatatgtggataatcgtgtgaaatgaaaggaaaatgtgattgcctattagttccctttacttgaagtgctaagtaaatgttgccaaattttatgcagtcttatgtagtgtctagcacattggtgctataaaaacgactatggaatgtatattttgaaaaggacatgttgttttggagaacataagtttggaaaaatatgccctcttatctgtaactgtggctcattgatttaatgcctggaataaaattcacacttgaataggtttgctcagaggctaaacatatataaagttgacttgttaacctcatgtttccgtgttagtgaagatttaagaattaaaaaactcctaagaggtcctagactagaaattgtgtgtgaaacatgcatgtacaaatccttatttttgttattttaaaggatatttagtgattcaaaatgttgacccaagtaaaatatgcttgttacatttgaaaaaacataagcagaacagaagtttgtatggtaaaagtgaattatccctttccttcccccgccctgcccctggccccgctgagatggagccttgctctgtcactcaggctggagtgcagtggctcgatcttggctcactgcaacctctgcctcccgggttcaagcaattctcctgcctcagcctcccgagtggctgggactacaggcatctgccaccatgcccagctaatttttgtatttttagtagagacggggtttcaccatgttggctaggctagtcttgaactcctgacctcatgatctgcccatcttggtctcccaaagtgctgggattacaggcatgagccaccgcgcccggccgaattatcccttttctctaccactattcccactattcagatgttactattaactgcttgatgtaaaggctcctaaattcatttctttgtccatgtgaacatataaagtagaaggtttttgttttttgttttttaaaacaaagatgagataacatacatatagctctgtaccttgctcttttcatttatcattgtactgtggccatctttccttattagcacttagagatatacgtctttcttttttttttttttgagatggagttttgctcttgctgcccaggctggagtgcaatggtgcaatctcggctcactgtaacctccacctcctgggttcaagcgattctcctgcctcagcctcccaagtagctgggattacaggcacatgctaccatacctggttaatttttgtatttttagtagagaaggggtttcaccacattggccaggctggtctcgaactcctgacttcatgtgatctgcccgcctcagcctcccaaagtgcaaggattacaggtgtgagccactgccctggccacttttttctttttaatactgctacagtataaatcttttttctccccctcccccaccatgccttttagaaaatgttttcaacagattttcttagctctgaatttgtattagaatactttgataaacatttttaaccattggtaattgtataatcataatgggcttaatataaactctaaagtgtttttataaatggccttacctcttgaactaatattacttctgcgaatcttttctgaggaaacacttcaaaatactggaaaaaatccagaagccaaaagaatttcctaaaggttaaaaatacttctttttctgtttataaagatactacataaccttagtagaaaattgagcacctgtaataaaacataaagaagcagattactccttgaaatctgccatctagagataatattttaaaacattttttgttgagtatattttcaccattataaatttacacacgaataaattgacactgtagcactgtatattgatgttcatcatactgttgaaagtctgactaattactcaatttttggagatagcattatttaaacagttcactataaaatgatatttaagttctcaattttttatattgtaaatggcaagtgaatatttttatatgtgtctgcacagtgtgcttctgtaaaacactcctaaaagtagaattggggagtatattttaaaatggttattttaaactggaatgaggtaatctgtgagtttcaggttgatagatgaaaatacatgcttcttgttagacaataaatttctcttaaaaaatctgaagtatgcagtctcttattttttctctccttgcaaatgatactaattccttatgcatacagataagaaacaaaaacttcttggaggtactgtataaattgtgacctccagttcagcttcttactaagggtagtacttactttgtcatctctgttcaacgtttgctcaaacacttttagtaatgattattccatttgtagatagctatagtttattggaaaaacctgtccttttactgagctgtgttatttcctaattcccacgtatttctgctctcagaaccacagaaaatcaagtcttatgcctctcccagatgacattttaaaaattatttgaagatagctacaaaatcttgatatttccttctcttttctgagcaaaactttttttttctttttcccctagctacatttatattatcatgttgtgatttctatttcctttcccaggctgaattttgttgtgtggtttggtagcgcaaaattaattgaaacaatcactttccctgatacgagtattgtacttttagaaataagtgcttctactagtcataggctgactcatactgaactgaaaagtggttcagatgttctctttccattccatacttgtacagttgagttttgaatctcgaagcagaactttgcatttcttttcatatagtttaatcttgtttggattagcccattgttctggcttcaggatatctttttgaatcatgatagattatctcaatatttattgacaactcagttttgtataactgatttgtgtaaaatcagttttttctgttattgtgcctctagtctttcatctaagtgactgacgtaatgtttaatagggtggggctaactgacgtacctctgaagactatccatttactgtggatttttttttaatttcaacaagttgtagttgtctaaattgactgtttttattttcccttgtgaaaatctgagcagcttttgcttatctttagtattctagcaccatgcttctttctccttaagattagaaaagtgcactctggagccagattcctgggttctaatcctgcctctgtcatttattggctgtggccttgggcaagtcacttctctgaaatctgggtttctttcatgtgtaaaatgaggatcataataatattattttgtggggttatgaggatcaaatgagttagtatacataaagcattagaatagggcctggcacataggagtgttatataagtgtactattattgtactcagatttttttctatgctctgcaatcagatctcaaattctttgaattcccagggttaattggtctggtccagcaagactggactttttgaagcagctgtagtctcacttcccatgtcctcatatttttgagcttcaaagctctttaatatttcatctgatagagttacttgaagaaatattttaatgtcctttttattataaaagaattagtgcttattaaaggcagtctggaaaatacagaaaaaagtgaaaggaaaaacaaaattttaccacccaaatacagccactaacttcttagtacattttcttttcctcccaccatatagtagatgtaatcacagcacaagtattttttgtattttacttctaacttaatatgatattgtgagtttttaaactatatagtctttgtttttaagaagtgattttaatggttgcataacattttattgagtgaatcgtaatcatttcccagttgttgaccttttaggtaatcacttttttcactgttctgaatcatactctgatgagcttctttatatttaaaactttttcaaaatttatcattatttagtaaggataaagtctgaaagttgaattctgaggttagaagctataaacatttttaagatgcgaagattatttgtattgatagatttgaccaaaataacgtaggagatagtttttttctgtcttttttagtaatcccatcagttcttttttcttcatgctctgaattatatagctcgaagtttctttttgtcttaatttgcttttttttttggcaaggttcatgtcatacttgacttttagcttcttggtcttatgttaattaaggtctttgtgctcagatgtgttctggattatgtattccctctgtgttttataaatgttctattaaaatatgagtttctgtgtaggctacgctggtttcttttgatgcgtcttaagctctagggtcatttaactttagtgtaggaagaactgaagagggtatcctggctgattcttctgttctgaagtcctgctgtttgttcctctaataatatttttttcaggcacacttcttcagctggtgcatcataactctggattaggttctaatcatttgttgcctagattatttcagcagggtcacacttcagctggctgctttcttacttttacagagttatttccccagtaacaagcatattttataagctgaaatagaatcttttaacctgattctttttggaaagctttccttttcttgtttttttcttttctttccgtttcttttctaaacattgatcaacagagaaaactgtaggaattccataagattagattcttaatttaaatccatggtttatgctttgaatattttatctcaagcatttttgtgtataagatgggttttgaactatgtatcttttgttaaacaactatttaatattactacatgagatttcaaatgcctagtatttcaaaacttaggttctccaaacgaggagaacctaggtacgtttctttgacaccatcaaccttcatcttttctgtgctatgtccagagcattcctgctgtatagacacttacagattttgtataattgtatgttcattttcacgtgtatagattttacagctgtgtctttcatttatttaagatctggacgttggtggttggctatgtgttgactgtttcattcaagtggaatgcaagcactgaacgctacttgagagcagtttcaattcctgtctggattatattgctttttcatttaggtgggttccttcttttttttttttttttttttaagtctagcctaaggtcagcagaggctgactgtgtgaatgaaagtgaattttttgtagtgtcatatgttgcatttaacattcttaatctttagaaaatgttatgctttaatctttcattaaattttaatgaaaatgatgtgctttaaaatgtctttaattatgttcattttccaaaaggtccttttaaaagtcaatacatcttaaaaagtagagcacccttggattctcatatcatttctgagtgtcatacttaggggaagatatagataagcagtcaacgataagaggtgctcagagacatgtgtgagaaccagttaaaggaactagagatgtttactctggataagaggagggaactggggctctagggtgggaaggagatagaggtaaggaggatataagacatgaaagcctatttctaatatttgaaggactgtcctgtgaaagagtgctttaaacagatctctgtaaccatgagggagagatgtcagagttgtgagttagcttcagagagacaaatctcttttccacataaggatgattcatgtcagagctgctcagagtaatgggttccctgttatgttagctgggtggctgctcagatgttgatttttcagcgtggtacttatggttgagactttcatctcccaagtttgagccaatggaaacactaagttctaatttaacaacacaattcagtaacccagagcagcagatagccttaaagtagtttctagagctactacttattgttaaaaataaaataaaaaacagctatgtctctgtcttcgtttgatgtcaaacaaagcattattctctagctttgttgagttggaatgatagaggaatttatctgcaagaacccgtatgtcagatatgactcattttgaactcagggaaggcagaggagggaggcaggcaggcagggatgttttatgaggttctaggtggactcagggaaatggttatgggtagggacctgtttcttggtgacttgtgaactttttttttttttttttttgagacagagtctcactccatcgcccaggctggagtgcagtggtgtgatcttggctcactgcagcctccacctcctgggttcaagcaattctcctgtctcagccccccaagtagctgggattacaggcatgtaccaccacgcctggctaattttttttttttatttttatttttagtggagatgggatttcaccatgctggccaggctggtctcgaactcctgacctcaaattagccacctgcctcagccccccaaagtgctgggattacaggtgtgagccactgcgcccagccaacttgtaaacatttttgcattatacactgaggaggagacattgatggttttgctgtgctcttttgggccattctctttcttgggagagaaagttcacgcccggtggtattttcaagaaaccaaggcagactttatggctttgagatctatgcctaattctggtcattctggggtgaagtagatggtttgagttcgggatggttttagacctttggtatacgttacaatagactctctttaatagaaccccattaaaggtaggcaggcatgtaccctatccatttgaccaggggcctctgagagcagggatgaacttaattttgagaaatcttgaagtttatctaatggacttaaatttttttttttttgcctgataagtaattctgtaactaatatatataccagattgttctgtcaaactacaaaactgagttttgtaaaaacaagtactaggtttttatttcactaaaaatgttaattcttaataatttgcagcatccctggctggctcatggagaattccagtattcctggttattgttttcctgatgtctgtgggtaccctctatgaaaaacagaatggaaaagagtcttctggtaagaaatagggcattctattaatactactctttgaagtattttggagagtagctttttaaaaaatgctatgatgaaacagctttgaatctatttaaaaacctatgatggtttctgagtggaaaataaattgtttaaaatattttaggttgttagaccatgatttgttttggtattattttattgaggcatgtataacttaaagttaaccataagccattgtattttaattttattaaaatattttatttttataaaataaaatatttttattttattttttagtgacaaggtcttgctctgtttcccaggctggagtgcagtggcacaatcatagctcactgtaaccttgaactcctgggctcaggggttttccaaccttatcctcccaagtagcgagggctacaggtgcagtaatcacgtaaaaatggcctacaggccgtgcgcagtggctcacgtctgtaatcccagcactttgggaggctgaggcaagcggatcacgaggtcaggagttcgagaccagcctggccaatatggtgaaaccccgtctctactaaaaatacaaaaattagctgggcatggttggcatgtgcctgtagtccctgctactcgggaggctgaggcagaagaattgcttgaacccaggaggtggaggttgcagtgagagccgagatcgcaccactgcactccagcctggcaacagagcgagactccgtctcaaaaaaaaaaacaggcatacaatatgtcacaatgttgtgcatccatgacctgtatctagttccaagacattttcattacctcagaaagaaaccctgtacatatatcagtacttcattcctttttatggctgaataatattccatggtaagagcacaccacattttgtttatttactcatcagttgatggatatttgggttatttctaccatttgtctattgtgaatagtgctgctatgaacttgtgtgcaagtatttatttgaatacacgttttcagttctttgtttacctatgagtagaattactgggtcgtatggtaattctgtgtttaattttttaaggaactgccaaactgttttccacagcagatgtaccattcagatttctaccagcagtgtatgaggattctaatttctttgcatccttgccaacacctattattttccactttttgataatggccagtccagtgggtgtgaagtggtatctcattatggttttcatttgcatttccgtaatgactaatgatgttgagcatcttttcatttgctttttggccatttgtttctcttctttggagaaatgtctattcaaattctttcccctttaaaaaaaattaaattgtttgcctttttgttgttgcgttttaggaattctttacatattctagatactagacccttatcaaatatatgatttttaaatattccattggtgggttgtatttttactctcttgatagtctcttttgatgcaaagaaatttttttgatgaagtccagtttatctactttttcttttattgcttgtgtttttgatgtcatctgacaaacaattgccaaatccaaggtcgtaaatacttacccttaagtttccttttaagaattttatatttttatctcttatatttaggtcattgatccgttttgaaataatttttgtaaatgatgtgaggtaaggatccaacctcattcttttgcctgtgtatattcagttctcccagcactgttgaagatggccttggcacccttgtcagaaatcagttgaccatatatatatgggtttatttctgccctttctgttgtgtttcactgatctatatgtctctccttaatgtcagttaacacattcttttgattactgtagttttgaaattgagaagtgtgagttctccaactttgttcttccttttcaaaattgttttgactattttggggtcccttgcatttccatatttatgatcagctttcctgtttttacaaaaaagccttttgggattttgatagggattgcattcaatctagagatcacttgtgggcgggggggagcattgccatctttacaatataaaaagacaaaaccacaaaaaccttacaatttatgagcgtgggatgcatttccatttatttcgttactctttaattttttagtgttttttttaattttaaattttaatttttgtggctacatagtaggtgtatatatttatggggtacatggaatgttttgacacaggcatgtaatgtgtaataatcacatcaagtaaaatggggtatccatcccctcaagtatttatcctttgttataaataatccaattatactcttagttattttaaaatatacagttaaattattgactatagtcaccctgttatgctatcaaatactaggtcttactctttttaattttttttttctgtttttgagatggagtctcgttctgttggccgggctggagtgcagtggcatgatctcagctcactgcagcctccacctcctgggttcaagtgattcttctgccccagcctcccgagtagctgggattccaggcacccgccatcatgcctggctaatatttgtattgttgtagagatggggtttcaccatgttggccaggctggtctcgaactcctgatctctggtggtccgcctgccttggcctcccaaagtgctgagattacaggcatgagccaccacgccctgtccatttttttaaactttttggtacctattaataaccacttccagcttccccgtaccctctcactatccttcccagcctctggtaaccatccttctgctctctatctctgagttcaattgttttgatttttagatcccacaaataagtgagaacatgaggtgtttgtctttctgtgcctagtttgtctcacttagcttatatggcctgcagttccatccatgttattgcaaatgacaggatctcattctttttttttggcggaatagtactccattgtgtataagtaccacatgttctttttccatttatctgttgatggacatttaggtttcttccaaattttggctattgtgaacagtgctgcaacaaacatgggagtcagcagtgttttgtagttttctttgtatatgtcttagacctttaatttattccttattctttttgatactatcatgtggaattgttttcttaattttccttttggatggtttattgctgctgggtagaaatacaacagattttttgcttgttgatcttgtgtcctgcagctttgctgaatttattagcttcagtagtttctttggtatattctttaggattctgcatatgtaagttcagtcatctgcaatagggatagtttgacttcttcctttctaatttgcatgcctgtaatttatttttcttgcctgattgctctggttggaatttctagtacaaagttgaatagaccatgtgcttttaaagattattttgaggtaccctggctgtgagtgacctatatctgcaaatagtttgttaaaggtagaggtctctaatgagttgtaagtggggaggttgtcaggatatagtagtggtcctcaaatcatcagatcagacttctggttacccagccgtgtggaagcagctgtgactggagaggtaaatctgaacacaaagcttctacagttgaccaatactttactccttgcttctttctgatggcgataataaactccaagagcagattactagctgcagtatgttttaaaaagaattaatttctcagataatatgtgtgttgcagtaaagttaggaaatacagagaaacaaaaggaagaaactaaaaatcactcaaaatctcactgtctacagattataccaaaatgttaactaatagttgttttgcctttaggcttttaaaaacacaaaaaaactagatcacagtgaacattctgttttgtaacccacattttaaacttaattatgtcatgaggaactttctgtgtcaatgaatacacttatagagcattatttttaacatcttcattttattctcatcatgaggctgtttgtggtactctggtgtatttgtacaggtaccttgtaaaagtttttaaaaattaatttgctttttattattttatttgataaatgagtaatatctaacaattgtaagccatatttttatttgtaaatatatatttagaattttaaaattcctgaaacaaagtaaccataactatatatctctctgacagtggaaaatagggaagattttattttattttattttatattttggtgtctaagttttctttgttcagcctgtcttcctggttataatctgttagactctgtggttatatatctgactagtggaagtaaatttcctgttttggcaactgctgtagaaagcttggcagtttcgacttgtttttctggttagttttatctcctttgttttctttcacctaatggcaagtgactcagacagttctgcttaccctttacctcttatgccagaatggtttccccttttgactgcttttgtccagggccaagtaagtaattgttataagaatataagtaatgcaagtctaaaccaaaggttgtggttgggttttctctacggtgtaaattctagtcatctcatgacagcagcctagaaaactgtaagggtaataagacttctaagaccaatttttgagcaaggggaaaaagaagaccatggtcgattatgaatactagccataaacttagagtagtgatgtgctgatatgcaagccagattgctgttatttgtattacaggctatgacaaggaaggaaatcacagacacacagaataaatgttgagtacagatttggaaatcttggttttatttattttgtttaactttcatttcaacctgtgtcaagataggtgattattgatctagaatccctttctggacttctagtctaaataatcctcatcataaaataaatcttttaagtgtttctttttcctaaatttctgagtatttttttcttcttgcccctaagaacatcgtttctttttaagaatcagaactcaaaccatctggtgtgtaatgggacagcccttctcttgtacttacagtcagtttcctgctgtagatgtcactgtaatataggtaggtacaggaatgctttagtatactgccacaacagtgtgtgcatcggctctttccttgtcatttccagtgtcccgttgtatcacttgctcttgttttccagtcacttgtgtgggtatctttctctatgtcttctgagctttgaaggttttgtgctgtggttcactagactcacagaattagtcctggatttcatcagaattcaaagcctgagtttggttcctagacccagagtactcttctatttatttattattcttattttattttgtttttagagactaagactcgctctgttgcccaggctggagtgcagtggtggtgtgaccatagctcactgcagcttaactcctgggctcaagcagtgctcccacctccgcctcagaaaactcttcttgtggatcattgctgagttagtttcagtggttgcttctgaacccaagggtcttactcagtggttttctcttagacctgagaagttctaacatagtatttcccaaaagcttaagataataagggaaaaatatttaagtgcctgtcatgagccaagaactttcaagtgcttttaaatgtgctatctttttaaatccacaagcaaacaaaacagaactcaaacaaataaatctttgtaagatagatggtatcttcatttacagatgaagatacttctagagattaactgactagcctgcagtcacacaggtgactagtggagctaagatttaaacttaggtccttggccaggcataatggctcatgctataattccagcattttatgaggccaaggcgggaggattgcttgagcccaggagttcaagactaaccttgcctggtcaagatagtgagaccctgtctctacagaaaataaataaatacataaaaataaaataaaataaaaattagctgggtgtggtagtgtgcatctatagtcccagctactgggagggttgaagatggaggattgtttgagcccaggaggtcaaggctgcagtgagtagtaatcatgccactgtactccagcctgggctacagaggtgagaccctgtcttaaaagtaataataatgataataaataaataaacataggttcttgaccctaagcccagcgttctttcccctccccaggctctttgagtaagtgtcagtcatcctgaaaaagtattgagtactcatccttcttgcatcagttgtagttgtcagctccttcagttttccatattggtcctgttgacttaacacaactacatgacctagcttccttgcctcctagatcccagaaaccttacttagtagaaaccttatggcttagtctgttttgtcctgctgtgacagagtaacacagacttggaaacttacaatgaacagaaatttattggctcacagttctggaggctgagaaggccaatgtcaaggtgctggcatctggtgaggatcttcttgctgtatcatcacgtggtacaagggcgagcaagagatggctggggctgaactcacccttttataatgacattaatcctacccatgagggctgagccctgatggcctaatcacctcttaaaggtcccacctgttaatactgtggtaacggcaattaaatttaacataagttttggagcacaaacactcaaaccatagcacctggaatccacgttcagtatgttcccttggcgtctgaggaaagaggtacactagcattgttatctcctataagtaaggctgtgttagactctttaaaaatactcttagttttttttaagcagtctagtgagattggtgttatgcttattttacaaatgaagaaacttaggctcagagagccattttctctgagtataagaaatttcttcaaaagttagtgaaacaatcatcagatatatctataatagcctggatacccagcctgagaagtaccagcaagtacagctgagtgctgttcctcctggcattggtaattgtttgtaaatgactagaaatgtctttgcagagatgaatcctgatagttgccttacttgttttgggatagcatgagatatgagtgaacaagtttggttcagtcaagcccaaattggaaaaagggagcaaaccaaatgttttactgctcccctcccagtccccacttctgatactgcaagttaaacaggcctagagaaaagtctactggtccatctccaggcccttgtgacgtgatactagaagccattgagagggagttgtattttccacattagtaatggaaacagaagccttcttcaaagggaactttgcaggctggggaggtgttatttggtatgcggtgcctgcttccaataagcatgtttggatgtatttctggtaactgctgctatccctgtgaaaaagaatggagtggatcaagaagtatctccttatttagactggatttaaagtatatttacccatgcttattaaaaaagttagtctgctcatcgttgagttgttgtattaacagacactgtctgacctgtggtctctttcttgtgtgccggactctgagtttctgccccctggtgctaggctgctaatgtcagtagcatgcttgtttggatttgtgtagatccctgttatttggcttctgcttaatgctggccctgtctctgggtagattgatacctgaaaccttggatgttctttccttttttttctttagtccttgagtcccaagattatgttcccttgtttatgtgcctatttttagctgtggcttttaaatacaataccattctaataccacaacttggccaagattctcagtcctggcattgttctgttcagtttatcatctccctgcctggactgttgttttttgtttttttttttggactctgattccaggccaattccttgtggtttttgaggtgctgaagggtatcattgagacagaagtcattaaaatacagatctgttggataaaagcagtttgccaaatcttatattcataattttcaaatactttgtttattttctctgtgtgctactcctttcatgcttttgtgaagtctgaggtgctcgaaaaatgtgctgagtcatttgtgtattaactagaaaaatagtgcagtttccattgatgtagctaagctttactgcatatttactgcatattttagtgccattagcaagttggagagttattccttaagccacagttttgaagatttaattgattgggtttagctttttctcgaatctttcagtgcctactctacagatacaagatattttgcttagctctgtggagagatctaaaaatgtctactaagggaagatagatggctatactataaagtagaaaggggaggagaggtacaaagaaatactacagaagggttagtggcttctgcttctagtttatactgtcgaagccaacagattgatattgatgatgatgatagctaacatttattgagtacttcctacatacccagcattgttctaaactttatttatttatttttcaagacggaatctctctctgtcgcccaggctagtgcagtggtgccatcttggctcactgaagcctctgcctcccgggttcaagtgattcttctgcctcagcctcccaagtagctgggattacaagcatgcgccaccatacctggctaatttttttgtatttttaatagagacggggtttcaccatgttggccaggcaggtctggaactcctggcctcaggtggtctacctgccttagcctcccaaagtgctgggattacaggtgtgagccactgtgcccagccagcattttatatgtattatttcacttcattctcaaatgagatacgaatttatgtaagcctcatttttacacatgaggagactgggacatctcgacgttaactaacttgcctatagccatctaagtagtaagaatagacctgggatttgaacctggggagtcttctttcctcacctgtgcttccagccactgaattgtgctgcttcctcatagcaaatgtgagaccttctatgccctggtcccaacctccctctgcattcttacgccactctgctcttctcattcacactatcttccggtcttattgaacttcctagagttctttgaagagggcacctctgctttttcttgcctttgtgtcttcatatttgtttttttgtcttcctgaaacacttttctacccctgctctctaagacaccagtctctcaggagcttcctctccaagatagaactgttctgtcttctttatctagcttacttttgttaaaatggatttaaaggatggcatctttcaatattcttgtcagacagctcctttggaaacccttcccagacctccctgcatggatttgatttccacgctgctccctaacagtttacacttactttacattagctcttaagtatcagactgaatttgagaccaggggcttagtctcttatatcagcatatagcctagtcgcctatttggtgaatgaatgcttagtaggcatttagaaatgtaagataaaatgcagctgaactgaaagtccattatttgaagagctatccaatgatcttgttattttgcaaaaaccatcaagggacttacttttcttacagtgtctcaagatgagtaaccatttaattaaattacttttgaagaggccagttcagtaattaaagacccttgactagtctgtaatcttatgtaagagagaattcttaatttttaaaatttttgacctgaaggtctttgtttttgtttttcctttttctactgtactgtcccaggccattaggtgttcccaaactttgctcttgagtggggcctaagagatccctcctgggtgtactgctgcaaagctaagtcttgccccatctctggtgtaggtcagtttgtttgtggaactttttatttttgagacaaagtctcactctgtcacccaggcagagtgcagtggtgtgatcttggcttattggcatgatctcagctcaataatacgatctcggctcactgcaacctctgcctcctgggttcaagcgattctcctgcctcagcctcttgagtagctgggattacaggcgtgtgccaccatgcccagctaatttttgtgtttttagtagagacggggtttcggcatgttggcgatgctggtctcgaactcctggcctcaggtaatccgtctgccttggcctcccagagtgctgggattacaggcatgagccactgcacccagcctgtttgtggaacttctatctgaaagtctaaaaataactctaatatgccaagaatcttcatccagctctgctatatattctctacctaaccatagtctggaaaccgggataccttcgtctctttgattcccttcattgcttcctcatcaagtgtggtccgctttgactcttctacgtctctttaacacagccgcttttccctgtttcccctgttgtggctgtagaccacactggcatcatgtcttgcctatagtactgcaacaacttttctccatacgttataggtcccctctagtctctttttctccagacaagcaagaatggtcttatatctcaaatggattatttatttacagggtggtgagaggggtgagaggcagttgagtgtggttataaaaggtcaacacgagagatccttatagtgatgatgctgttctgtatcttgtgtcaggggaaactggacaaattgtggtacactgggattatttcttgcaactgcatatgagtatacttttatctcaataaaatttcagtgagaagaagactactatcctgtttgaaactcttcagtgcgttcttcttcctcttagaataaacactaaagtccttcatgtggtgttctgtgatctgcatcatctggcttacctctccagccttgtttatttgataccagtttcttactagctgtctgtgttccagacacactgaccttctttcactgtctttaatatgccgggttcttctcacagctttccttctgcccaagatattgttaggatgtcacaagatacccagcatttctttttatagcaaccataatttctatacacacgtttatttgtgtggttatttaattcatacctttactatactccctgggggcagggtctgtgtctttatccccagcacacagtacatgtaagaaatgaaagacactgtttttctctgtcagccctttctgtcttattggcatttcaggaggaccttggatacacaggccaggagagtaaggtcctaatccagaaatctaacttaggctttcctctcagaccatgagtttgaatttctctcatattgagagatatgataccctatctaaaaatgaactctttcaggtcacaggggcatttattagaggagggacagagtatgactgagcaaggtgagtactcttatcctgatgtctgaatctaccaaagatccacctcaggctctggcttgctgctatctgggagagggctagctttggatatttgggtatgtggagttaattaacttggagctgaaattcatcggctttctgaaggatcatggctcttttcattggggtgacagaatcctatgttgccatacggagtcttggcctaccaaaagtaatgtctcagttgtatgagtgtgggtgtatgatttggtgactaggaattgctagtgttcttagttgtgaacaatagaatctaccccaggtagtttaaataaatagtaggaggtattggttagcatttacaatttttgcacatggaatttctggaaagaccagacaattaatcttggaatctgacacaggtggaagcagtgcaatcaggagaaatgctcagtgacactgaaggactgtttgggcagagggccacggctgctgctgctcgccgtgaagttagagatcagacatcagaacttctgctaagttgctgcggaaaaaccatatgccttcctgactgactgtgtttgatacaagagctctggctttcaaattacagtgtgccacttcaggctctcaagtcctgcacaggtgtacctgcttggtagaaactgtgtcacatgtgagacctcggctgcaggggaatccaagaaatacaatttttttagctctccagtctagtgtgcaagaaagtgtgctagaacccgatgctatgtgagctattcttccttgtctgctatagaaggttaaaggttgacagacttcctttgccagtgaatgttttacttgaatttagtgcaaatgattgagcttggtactacctattaggaatttaacatggaaatatataatgtgaaacaacgtcatgatgttcctttagattttcaagtggtggattttgcctgtactgagttatgtaatttataaatctatatggttttgcataatagccatatattcgcatactcatttgtggaatgttgttatgaccaccaattgtggattatctcgtactaacatgagacctagtcatacaacatagcctaagacagtcagatcagggagctcacagacttgatgtggtagtgtttttcaatagaagtatgcattaaaatcaacttgttaacaaatgtaagtgtgggactccaagtttacatgtgtagtgtctgccacatccaccagcattaagttcccaaaggaggaaggtatacagagagtcaagggatttgcttttttagcacactttcatgtcaattcttaatggttcttccttggtgaagaaccacttattcagtgggtcagtagtaaccattttattttgttgttgttgaaaatgttggactgtgtttaaatttgcagccattatttcctactttaaagagttttgaaaatggatgcttcttttacaggggcagagttaccagggcaggttatctccatggcagcttctactctggcaaacttggccatctctatcacagggtatgaatcaagcagtgaagaccagccctccactcagcctgcaggtgactgatgttctggtgacattcaaggttattctggaaaatgaaatgtacatagaaagtaaaattcaggacaccagcatcacaaaatgctacttactcctgctgatccttcatttattctctttggttcctatttttatgcccttttccctctcatctttgttctcatatatcactttttaaatacatgtaattatgtaacttcttgagtttcttaccttggttctttgttctttcctttttaaaaaaggcttttcttatttttcttctgttattcattgcttttgtttttcttattttccttttctccgtctccatttacctttcccacatttccctccactttacgcatatcttatcttgatttcttattttccatttctttcttctacaactgtcagttctcctccatgattttattttgccctatctcttcctgttgttttttctttcttttgttcccttttcccaaccctttttttggggaagacttttattttccatcttgcagtcatccatttctctgtcattctttctctgaaagtttgcatgcttcatgtgttaatatattgacccctcaaacagacccctctggttgttttggactcgttgtcctgtgtggcctggctttgggaattgcaggctcctgaggaatccagctggtagatataccagctgtagagtcatgctgtactcttgcagagttccagaatgtaaaaggccaccttagtctgtgctgagagatccattagtgccagaggtatttggagttagggaatatttagagtgaattctccttgaagaactgactttagaaatgtcagctaagataaaggaatttggtgtagtaggaacacttatttttcttgcacatggaattatgtttccaaagtggagaggaaatgatattttggttttggactcattcttccaaatatctgtcacacccaccatcatgaagtttccaaattagaaagataactcagagcaaagtcaaacaaaagcatctgttaactagcttgggctttagccctgcacttttaagggtagaatgttggtcctagtgaggtgagctgacttaccagggtgcaagtgatctcagtagtaaaaattgactcatagctgaacttttaacattaaaaacactaaggaaattatgatacagcacttggtgggctactgtatgattgcttatgaaaattatgaaacaacagggaagtcattcattcacttatttagtgagcacctcctatatatgagatactattgtatgtgccaggaattcagtggagggagaacaaaacagacaaggtcttagctctggtggagctgactttcaactgaagagaaagaatgagaaaggataagtagaacatgctacaactatgtaaaagaccagggggaaaatgtgaggttgggattatgggagttcttatttcttttctcttttttctagactttttttctgacgtatgatacttttgtaattaacaatccacacattcaacgtgacatacttttgtaattaacatttttttctaatggaaggcaaaatgcaagttttaggatcttaataattttcattattatagtatatatagagtaatactactttaagagttttatgatttctgatgtgtatggtatatcttattaaaactaggaaatagaaataatagcaccctatagtaaaatgtaacatggtggttgcattgttagaaaacagtgtcttatgtgaaataatccagtatggtttcctttatttgaaaatcctcacccaagaaatctgtcattgtttttgtatctcattcatgtttatatattctgtttgaaagccctgggttcttgtaagattggttggttccattttaggtgaaataacactgaaaagtcttcttgtgtcagaaatgtatataaatacacctaatctaaagttctattgaaagaaaagggatttttaaatatagaaattctagtatatgttagcatttgtttctttaaatagtttgaataagttttatgggataattataattctcagctactttgtcatgtattttgttttaacgactcccaattctatcaccaactaacttagtcttcctaaattaaagctctattggcattgtaattctccatgtttttcagtgcatatgcaaacataggtccaaatatttttgtcttttttaacccgatgtaatcataccatatcagcacattttgaaggcctgaaacaggctagcctaatgagtggctctgtattcccatttcctcatgtggactaatgcggtgtgtggtgtttttcttttccttttcagaagcagtggacaggggagaatccgctccaacgttgtccacctccccttcaccctcctccccttcacccacttccccttcacctactctgggcagacgaaggcctgaaataggaacgtttcttagaaagaagaaaactagtgacatctactttgtgtctctagtttgggccattgtcgtcatgcagatctggttgaacctgtggattgtgcagttgctgccagtgccgattgcaggtcgttatctggttaagtacgatctcgtcttgtctttgaagattgatttttttctttttttacttttggattttaatatttgagatacatttaccgtcttgcaaagtaaaacaatcttatgtttgcatttaaatagtaaacaaacaccatttggttaatttattactttgatacatctttaatatttcactttttttttttttttgagacggagtcttgcccaggctggaagtgcagtggcaccatctcagctcactgcaagctccacctcccaggttcatgccattctcctgcctcagcctcccgagtagctgggactataggtgcccaccaccacacccggctaattttttttttatttttagtagagacagcgtttcaccatgttagccaggatagtctcgatctcctgacctcgtgatctgcccatctcggcctcccaaagtgctgggattataggtgtgagccaccgcgcccggccagtatttcacttttaagctcaaaaaatgtgtttagcttcttacaatttcatgtagtatttgagattaatagctccatagagagatttgattgtttagccatccatgattctgtgaaggagaatgttaacaatatctgtgttttggaatttgaagatcgaatgattttttgttttttttttgagacggagtctcgctctgtcacccaggctggattgcagtggcgcgatctcagctcactgcagcctttgccccctgggttcaagcaattctcccacctcagcctcctgagttgctgggactacaggcatgcgccaccacccctggctaattttttgtatttttagtagagacggagtttcaccatgttggccaggctggtctcgaatccttaccttaagtcatccgctcacctccgcctcccaaagtgctggcattacaggagtgagccactgcgcctagctgagattgaatgatttttgagcgctactcttagggaagcacgttttaccttgcctttttaattcaaaggaaatgtaggctttgagaaatacatgtatgcaaagtcttgtgatttggcagaaaaattaaattacatgtatatctatattatatgtattacatcaaaatggaatcatagttttccataatccattaaatcaggtctttgtatcttaatgctgtggtaatttaaggcccacctctattgttttgattctctctaaaactgtctttctcctaagactagaaagagcaagggagagttttctctgacaggtgcattgtagaaacatcttttacctaatattttcctgattatttgggctctcttcttatggcagccatattttgtgccaaatttattaagtccttagtggctgctgtggattttgccttctgagtaccttctacatttgattactcctcatttcctatgtcaaggtttttcactattgattaaaacgtaatctgatttttggaagctgctctccactgtagtctaaaagtctaaacttattagcccatttaccttctagaccattagttttcatcacttctttttatttttcctcactcaattggatagttaattaaataggcattattttttaacatttattatgaccagagcatggtatagtagtgcctgtcctcagggagcatgcaatataaatggttgaagtttgtatctgtattttttttttttttgagacagggtctcactttgtcacccattcaccacagcctcgatctctcaggctcaagtgatcctcctgcctcagcccctcagatagctgagactacaggtgcgtccactggctattgttttgtattttttgtagtttgccatgttgcccaggctggtctcaaactcctggactcaagcaaacctcacaccttggcttcccaaagtgctgggactatacaggtgtgagtcaccgtccccggcctatatgtggttcttctgtcctcaaacagaacttctgttaggcagttggaacaagatacagctttaattaagcaagtcacagagcagataccatggccatgcttcctgttaaactgagtggaacagtttaaattgctcttctagattgttccatacttttttttttttttttttttttgagatgtagtctcgctctgttgcccaggctggagtgcagtggcgggatctcggctcattgcaagcttcacttcctgggttcacactttctcctgcctcagcctcctgagtagctgggactacaggtgcctgccacaacgcctggctaattttttgtatttttagtagagacggggtttcactgttagccaggatggtctcgatctcctgatctcgtgatccgcccgcctcggcctgggattacaggcgttgagccactgtgcccggccctgttccatacttttttttttccagatgattttattatgctggcaaactgtgtgtcaaatgctgttgcaactctcttttccttaaagtttgttagcaggaatttcatttctcttagttatagcttaaccttctagtcatcataggaatttgacatgatcttgggacagcaggctgtgaataaggtggcccctaaaagcttttctacagcttgtaattaccctggacttactgaaactataggagttcttttagggcttttgtagggatttaaaaatggtaataaaggaattgttgaacttgtgtgtaacactgagctcatggttcaaaacagcaaattgtgaacctttaggttgcaaggccagagctaagaacacaaatctctagagttagggaaattatgtactgattgagatacagggtccaaacttgaaggcaagcctcacagttgagtaacacttctttctggccctaccaccttcttaattggcttctaacaggaagcttaacctctgcttaaagagccacttcactgcccaactccaggaggagacagtgtggtttgagagtggtccccactgaagttgccgtgcacagccttgggccatttgtagcagccctgctagtattcagcttgcttctctactgaaccctggcatctgttcagatgttgagagcagcatcaaatggggaaataggaacaacattactctgcagtggtacaaaatcatgatgcgtatggaataccttatacttttctggtcactaaataacgagcaactaaggaaaagaagaatatttgacaagaacagctataaaagccaaggagatgaggaaatgtcaggggtttgtattatttacccaggaagggggaatatgcaaggggccagaattgtagtcactgaaatcttcacgatgagattatcttttgtttatgtgggctgtaaaataatccctgactctacaaggattcagacttcaggaagaagataatatataggcaggtggggatggtttgaaaagttacttggtccaattccatctgtgtggggagtactttgagtcccaccctgctttttaacattgatcttctttttaatactagctttgttgttttagaaaggttttgtgaaattaaggtaccttttcatgttacaacttgttaatctatattttgtttatatatgtattttttgtctttttttagtctggatactcaaaaagcttgtcattcactttggagttgtggatttcctagagaaacgctaccatgtgtggtggggcattatagaaagcttcctgaaggagcggcagggagctctcgcgccttggcccattgtcgggcttggaaaattcttgttaaaagttgatagcaaggtattgtattttaaggacttgggctgtcttaatggagttaatatatttcgtggtttgaacttttccattctatggtgtttatattgtaactgttgataacacatgtaatatctaattctatgatgaaagtttaatgtttaaaattatggtttacacaaggataagatgggtttactttaaataaggcttgtgtaagtattttttcctcataaaaatgggagaaatggattttctgatttaattccttcattatattaggaccaaattgaaatccagagaggttaagcgacttgcctaaaattatgtagctaggtagtggctcagtttagtgaatatttttggagtaattaccatatgtcagatactgtattaagtcctacggaaaatcagatgaatcatggaaaaccagatacagaagccttgtttattggggaaagacagcagttgataaaaattcagagatggcggttagatttagagccttagtggttaaagagcatggactatgaatccatgaagtttcctaacctttctgtgccttggtttccataccagtaaaataggtacaatagcacctaccttgtagaatggtggtaagggttaaatgaggtaatatatgtaaaatccctagattattgcctggtacacagtgagctctatgtaagtattaggaatttgtgtaggaaaagtgtgtatgggatacagtggcagcactgagcaagaaatgactcactgttcatagggtcatgagaaagggaaggttagcagaggaagtgatactggagcaagttttgaagcacaggcgggagtttcttaggtagacatggccagaagggcaagcagacggagcagtgcaaaggcatggagacactaagcctacgagcatgcaggttattttatgtatttttaattgttggattcccaacaaagatgtggttatcatcatttcaatcattatatatcttaaaggaatactacattccgttgattttaaaactttgatgtgttacagtttttccgtccctagtttttcctttgtctgggatggtttccttctcatgctttccttttcttttcatactatggttgcattctctaatgatactccactgttcttatcttctctttctcaccttaccccctatcctcaagctctggcactggctaaataagaaggtaaatgaacacccagatgttggtttttactattgaattccgtaatgcccctgtatcgcctttttcactctatgtttctgtccatgtgtcaaactaagtttttgttttcaaagttttaattataagctatggaaggttgtgaagcatgaatactatcacagtataatttggtaaaaactcagcaaaggctgtctaggatatggatggtatctccttgctcaggtgtttgtaagaagttctgtctcatagtccttttgtcccctgtaaatccagttctgtaaatgtggctcagcctgatattctagtctcctttgatgtgtgaaaacacattaggcaatagttattgtaagggcaagagagaactctctgtttgatactttttctataaaagacacaggaattttttaaaaagacaaatctgtgaaatatttgtatggtttccttggcagataattttatatattgtctttttttaaataactagtatttcaaaatttatttttaacttaaaacagatagtagtcatgacctgtgacatcgaattttgtgttttctccaaggtatgaggttgtgtctatggtaaatgcttcacatgattggtatggcattataataggcacacttttaataacttcaataaaggctaatccagatacattaggaatgttgtacctcgacatatagtccacatatcgtaatgtttaaattaattttaatgaattaaatagccaggccttgtggcacacacttgtagtcctaactacccaggatgctagggcagaaggattgtttgagcccaggaattcaaggttgtagtgagcaataattgcaccattgcactccagcctgggtgacagcaagactctgtttcttaaaaaaataataatttcaatgaatctctaggacagatagcaagagatgacatcatttatatatgttgtgtttaaacataataaaactatatatatgtcttttgtggaaatattatatcaggccttaagaaagatgtagtacttcttgaaaatagatcaaaatgagacttttggatgggttaggatttcatttttttctgttgaaatagaggagaggggagacttgacaatgcctaaagttttaaagttgagttgaaaggaagcattgtgtaaaataaacactcccacactctcacatggttgtgtatgtctccattccctataaaactagtatgggtaagtgagttcaatccttggcaaatgatgtgcaaatataagtcacgttttaaaattttgaccaaagaatgtggtttctaaaaaatttttatttgttctaattgttttttagagacagggtcttgctccgttgctcaggctggagcagtggcacaatgaaagctcactgcaactgtgaacttgggctcaagcgatgattttgtacttttcttcaatttgtgttatattgaaatgaaattgccctcaagagatgggggaaaggagaattaaattcattggattaaatttgatttaaccttcagtggactaaatgagctagattacctaatttatgagactacttcataactgaatcatcgagttaattttaaaagatctctaagatcaagtcctttttttctttcctttgatgattccatataacatagtaaagcattggtgtaaagatagagtaactgcttgagattttgagcgggtacattccaagaaaggacatacataagttgagaactattttattacattacatctcaaagtcagaaaattgcagcactgggtaatgttggtatgtagaaatttcaagtggagtgaattaggaaaccaattcaagagaagagagggtgagagagcacacatgggttaattgaaatgtaacccatttctcaagagttacttgttttatttcttttcctttttttttttttaaatttgagacaggatctcactctgtcacccaggctggagtgcagcgacgtgatcttgactcactacacaacctccacctcccaggctcaagcaatcctcccacctcagccgcctaagtagctgggaccacaggtgtgcaccaccatgcctggtgttttttttttttttttttttttttttttgtatttttagtagagatggggttttgctatgttgcccaggctggtcttgaactccttagctcaagtgatcagcctgcctcagcctcctaaagtgttaggattataggtgtgagccactgcacctggctttgttttatttcttagtattgattatttgcactaaaactcaagtggaattttgtttaaaaacaaagcaaaatgaaaaatatataggcccagaataatgaaagagaagaaaaactcagtagtggaatactttcttaatagcttgataaataggccagttagtgtagaagttttagagtatcttttggtgtaactataaatttactgacatctctaaatttaaaaaatgcatgcccttcattcacatttgaaacattcggaatgtcattttaaaattacttctctttttttgaaaaataaactttaaaaattaaagtaacttctcagtctttcagcatggaaagattggggacatttagagacttggtaatttccatgcgagggcaggtggattgggttcctttgcccaaagcagaacgtgggacaggatcagcctcgtgagatagcacgtctggcctttggtccccttctccattgcttcctctctttatgtttctcttcctatctctccgagttgctgtttctttgtgagtctttttctattcagtctttgtgggagttggttcatcttttcctccatctaagttttttatcctcttcactttttttcctcttttcgtccttagttttatgtatcaactccccgtgcccccattttttttttgcttgaccttctctgtttccttttattcttgaataaatcttagtctctgtttctctttcccactctttcctctctcttactgtctcccttcttgtcctgttctcagctaacttaactggccacatgtgacgaaaacaacaacttcttagcttcttttttgagcatcttaaataattttgtttattttaaatttcaatgaaacatccaaccctcactgtcatcccttggatatacgtttttatttaggtgactgaatttttttcaacctttatggcttgtgatagaaaaattttaccctaacttaaaactaaaaaattggatattgtaatgttaatgtacctaatatgtttttgaatattctatgttttatatgttaaaaatactcaaacatgtttctaagtagaatatcatttacatttaaaaatacatttcaggatatgacttttctgaaaaaaaaaaaatagaggctctacattattttcagaaattgtaatttgtggatacaaatacagtcttaattctgaaattattttatttatgcttgcttattcaaacacatagtaattgaatgcttaccacgtgctaagcacttagattttggagatacaaagaggagtgatacaaacctagctctttccccaggaagctgccttgataactagttttcaattggtttctgattgaaagttttcagtttcattgattttagaatttaacttcagaatatgacatctgaccttccatatcttagaaacctgttattccttttttttaagtctctgcattgtctttgatgccttggtagcatgcactgaaaattaactcttctgtttgaagctgtaattgtcaagattaaagattaactttttatctttgagttcactttagcattgatctcttagtgacagtgcccttgatgaaaaacagataaggggggcacaagcttataaacgtcaagtgaaagtaaatgctgcagaactcatgttgtttttttaaccaacattctttgcttttggatgtttaattcactggagagcataaatcagatctaaattaagaataacttatttagcaatgctgttgctcaccttggggttgagcagtgcattgtggtgtttcagcagttattaatctagttaaatgtagttttgaaatgttagatggtagctttgcatgaaaggaattctagcaatctatcaagtatatattctgaaaacacaagttgtttaaaatgtaggattatttgtggttgtgaaagatgaaggaagttatagcaagataatgtcagatagcatttagggaaagcacagttttaataactgattaagaaacagctactacattgattatatcaattatagtcatgtcataaagcttatgttttcagaagaatagaaacttcaagtagaatatcagattttaaaaagcattttattatgtattatgaaatatttcaaacataaaaagatgtaaagactatctaccaatgactccccccttaataaaacaaattaacctgaaggctgttttgtgcccctccttgattgtgcattcacctcccaacccctcgctccttgggcaactgttatctttgttatttgtcattgccttaacattagatttttttattactgcttttgtaattctaatgatatcaaatggaaaaaatattttgaatgcaactcctcttttaatttgctccaattttatctgtattttttagtccatgcctgtattataagtattataaatactatctgtatatacttttgctaaagtcgtgtgtatttgttaaactgatgatacagcttcataagattttaggtcagctaatggattgtcaatattttgtttagaatacttaccaggttataaattacaatttgaaacatagatatcctatagtttgagaatttgaacatagatatggattatgttgaaatcgactgcctttttcttagctatgacagtaataaactatataacaacagcagtaatgagtactgtgaagtttttaaagttgcttaaagcttttattgctttaattattatgccataatttgctttgccatgctggagatcctgttttgtctttatgacaattgagtatatgtatttttaaagttctactttaaagataagtaattctctttttcgtttttgtgcagatgatcatctggttggagaagatgttagataaaataattagcattttcatcatatttttgttagtgataggaactcttcttttagccctactcctgactgcaaaggtagagtacagtgattattattctcattaataaacccttaattgttagaattgtagtctggataaaaagctagcagaaggggcatggaaaatgttaacttgatttaaaagtatgtacaatagctaaaggatttatgatttgtatattactaattttgccatgaatttgcctagtatattttcttttcagacctcttttacatgcatttttattttatcgaaacccttgggagtaaatacaaatgaaaaaaatgagataatgaagaacaagtggcgcttgttttttttagtttaataggagaattaggatctggtcttatgaattctaatctagttagtattcttcactagatcagaatttgctgattaccaccttccatccttgtctcattgatccttctgctgatatataccatagcacctttatttctcgctttccaggtccttccagcttacatttcctttccccattttcatctcatcaaagaaaattattctctaaagaacacctaaaatgttatctttatagtgatatctcttactattttttttaggcttatcaagtctgacaagatttcccccccacttttatggtacattttaatctttattttatctgaaccgtattgaactccacaacccagattttggtatgttcttttcaaggagttggtgaagcttatgtgaaatcatggatacaaaattttttttattcctttagttcccatagagacatgttggtaactataattgataatctaattaaccaatttgctaaagaactgcactatttcttcagtggcatctctgcttggaagtcctattcttagtctcagcttcagtacaccctcaagctatcttatttgcttctaaaaatctcttctagtacttctgtttcagtctttgtatagttcctatctgttctgtggatattaattatgtatagtcacgtatatatactgtgcagacttatttagaggctttttgtcatattttgcttaaacctgctactgtgcaatcttacattccagttctttcattagtatggtctttttttttcctttctcctctcttctacacttctattctacttttccttcttggtccctttgcgtagcatcttttgcctggccatctcagttttatcttttaagtcctttttctttgttcatcccctgcttcagtgagcttttgcttctctgaactttgataacaagtattactgaaccatttatttctgggtgtagaattcatccaaactgagcttttgagggaaccttattggttatctaattcattctcctggccagtacagctgtcattctctgaaacatccatgacagtatctacttgaatgtttaatggacatctcaaatgtaacgtcagagactgaattccagaccttcctccagttgtctgttcttctcatagtcttcagtgacaactccattcttctgcttgctcaaatggaaagtctcaggatcatctttgactactgtttttgttttgtatccacatccagtttgccagaaaatcctttttggctccaccttcctaatatgtcctgggataatagcagggtgaggaagtcaggtaattcctttccacagaaatcaagaataaaacaacatgaaattattaaaaacaccatttaaaagcattagaaaatgaccaggtaggcaactaggagatctttcgttgatgaaaagctgctactgtagctggtaaaaacaggtactttttctttacaggtaaaaacaggtgacattcttgcatgggcagtaaaacctgcagcttttcttgaaggaagtattcttcagtgcacagatgtgtttaggtttaatgtagcttcatttgtctatttttgcctttgttgcctgtgcttttggtgtcaagtccaattggagatgagcagagcctcagacacctgtgggacaatatcaaacatctagcagacatgtaataagcatcccagaagatgagaagaggaagagaaaaaggtagaaaaaattatttgaagaaataactgctaaaaactttcccatgtttggtgaaaaacattaacagatccaagaggttcaacaaaccttcagtagaataagcatacacaaacacaaaaccatgcctagctacatcatagtcaaactgccgaaagacaaagataaaaagaaaatctggaaggaagcaagagaaaaattacacatcacaaacaggggaacaatacagttagtgacttaattctcttaataaacagcaaagactaaaagacattggagtgacatatttaaagtcatagggagaaatctcaaacaatacttttatagtcagtgaaactgttctttcaaagtaaaggcaaaatgaaaacatttctagataaacagatactgaatttgttgatagcagacctgcacttatatggaatgctaacagagctccttcggggtgaagataaatgactccagaaataatctggatccaaagaaagggatgaaagcacttggaaaatatgtgggttatattttcccctgtcttcttttaatttatttaaacaaatatgactaaagaaaaatagaaatactgttgtggcctttataacatatatagatgagctatgtatatataaaaccatagcacaaagaagagggctggcaagtagaactgtaatggtatgaagttcttaaaatattttcctggatataagtcaatattaacttgaagtagattatgataaattaaaagatgagataagatttagataagttaaacagcaggcaataaatagcctaaggattaggggaactaaaatggtatactaaaatttgctgaacacaaaaggcagtgcaggaacaacagaggaccaatagagatgggacaaatagaaagctagtagcaaaatggcagacctaaccctggtcatgacaatacttaggttacacgagaagcaactaaacagtcaaaaagcatacattgtcagactgaatataaaaagcaagttccaacttgcttttggtatgttagagacacactttaaattcagtcacaggaaggttgatagtaaaaatattaaaaaacatacactgtgcaaactgtccacagaaaatatgtgcagttgattctatattagacaaaatagattgtcaaaaagaaatattgctagaggcaaattaaggacttttcatatggataagagttaatattgacataagataacagttacaaatgtatatgctcccaacagctgagctctaaaatacatgaaatccaacattcagaattaaaaggagaaataaacaaatctatgattatagttcaggattcagtactccttgcagtaattgagggaataagtagttagaaaataataaggatatttagaagccttttaaaagctgggtgtggtggcttatgcctgtaatcccaggacttcgggaagatgaggcaggtggatcccttgactccaggagttttaagaccaacctaggcaacatgacaaaaccccatctctacaaagaatagaaaaaattagttgggcatggtgacttaagcctgtagtcccagctacttgagaggctgaggtgggaggattgcttgatcccgggagattgaggctgcagtgagctgtgatcgtgccactgcatgtcagcctgggtgacagagcaagactttgtctcaaaagaaaacaaaaacgaaacacgccaaaaaacgcggtcagtcaacttgacctaattaacaattatattcttttatattatatatataatattataacaaaaattatattcttttcaagaaaacatggaatactcaccagaataaacaatatgttcaataaatttggaagtgttaggcaaggcacagtggtacacacctgttatctcagctacctggcaggctgaggcaggaggattgcttgagcccaggagtttgagaccagcctgggcaacataaggagaccctggctttacaaaaacaatttaaaaatttagctgggcattgtgatgcatttctgtagtcccagctacttaggaggctgaggtgggaagactgcttgagccttggaggtggagactgtagtgagccgtgattgcaccactgcagtccaggctgggtgacagagcgagatcactgtctcaaacaaaaaaagcatttcctgacacagaattaaattaaaaatcagtaacagaaatttagggaatgtccaaatatttagaaattaagcaacatactttttttttggcggggaaggggtgtatataacattagttaaagcctttaataattttaaaataagaactttaactttttttttattatactttaagttttagggtacatgtgcacaacgtgcaggtttgttacatatgtatacgtgtgccatgttggtgtgctgcacccaataactcgtcatttacattaggtgtatctcctaatgctatccctcccccctcccccccaccccacagtgggtcccggtgtgtgatgttccccttcctgtgtccatgtattctcattgttcagttcccatctatgagtgagaacatgtggtgtttggttttttgtctttgcgatagtttgctgagaatgatggtttccagcttcatccatgtccctacaaaggacatgaactcatcatttttttatggctgcatagtattccatggtgtatatgtgccacattttcttaatccagtctatcattgttggacatttgggttggttctaagtcttttaagcaacatacttctaaacctgtgaatcgaataaatttcaaaggaaattagaagattttaaaatggaagaaaatgaagccactgcatatcaaaatttgtgggatgcagctgaagcagtgtcttgttggaagtttatgtcattaaatgcttatatttgaaaaaggaaaatcagtgacttaagtttccaccttcagaagctagcaaataatagcaaattaaatccaaagtaaatgaaaggaaggaaataataaggatcaggtgcaaatcaaggaaatttgaaaaggagaaacaatagtgaaaacatgaataaactcaaaagctgtttctttgaaaaacatcaataaaattgacaaaattttagccagactgatgaagaaaaaagaagatacaaattaccaatatcaagtacaaaagaggaaacatctctgcatatgtcacggatcttgaaaggataagggaatattgtgaacaactttatgccatcaagtttgataacattaaatggagaaattccttgtagagaaggagtggaacagactcaagaagaaatagaaaaattgtagcccactatgaggacaagaaattgaattagtgtttgaaattcttcctaccaagaagcgctcaggcccagatgatctcactgatgagttttatcaaacatgtagcgaagaaatactgcctgttctacacagtgttgttcagttagcaaagaagtaacacttgtcagctcattttatgaggctagtattgcccagataccaaagtcaaaggcattcacagaagggaaactgcagaccagtatcccttataaatagacacaaaaatccttaacaaaacattaacagattaaatcctgcagtatgtaaaaaggaaaatatatctatgtgaggtttatttcgggaatgtaaaacccgtttaacatccaacagttggttaatgtaagataggtctcaaatccagtcacttctttctcagtaccgctactgtcctgctcaaagctatccccgttctctcttgaattgttccttagcctcatttagtctgttttcaacacagcgtccaaacttactttaaacatctaagtaagattatgtcccttagcttacagccctctctttttccatatcccacaaaatgctagcctaagtcctcacaagaacgtgtcaggccttattcattctggctgtttttcaggcattgcacctgagttgattatcccctcattgtgtctgaaatcagtttgttttccccgtcttggtgcagtttgtattttgtgttcttcctacttttctggggcccgatagaattggaagtggtatcacttgatggcttaggtggctatgtatctttgttagggtatctagactctgttctgttctgggttggtatgtgacttgccctagtgattttgctacttggttaatctcatacccatgcccatggaaaaataccgtcagtctttgtactgtctcactcaattcctggcatactatggaactttcactgcagaaagggacagagatgaggggtgggtgtgggtgggggactttgatctctttcctctgatttatccttttctccctcattacactttctttccctctgtcatcagaaaaggataacgatgtggcttcttttctccctgttactcgtgaatcgtaatatatttgtcagctcacctgtgtagctcctgggtgatggggtcagtttaggagtgagctgttacgcctctctgttgtgctccagaatgttttgtttctttacctgatggctgagttccaaattgtatcagattatgtttctttccttgtttggatgtcctgggtgaaaaaattttttttcaactgattaattcccattttatctccctcaatttgttggttattgggcaaggtaaattcagaggtgcagcttctgttggctttttttactcagaaaccttacttagttgcagtttacttacagtggctcacacctgtaatcctagcactttgggaggccaaggtggatagatcccttgaggtcaggagttcaagaccagcctggccaacatggcaaaaccttttttctactaaaaatacaaaattagacaggcgtggttgtgagtgcctgtaatcccagctactcaggagactgaggcacgagaatcgcttgaacgtggggggtggaggttatatcgagctgagattgcgccactacacaccagcaagcctgggtgacagagcgagaacctggctaaaaaaaaaaaaaaaaaaacaaaaaaaaaaagttagttccttatttgcctgtttgtctcacactgcgtgatgaacctgttagctcacaaagtgctgatattgcttacatagatacacaaacacatttatacgatatattcatgcaaatgaaatgtatgtacatatacgtgtcaagtatttgaacatatctatttatgtatttttttcttaagtaatgtgttgaacagggagctagcatgtactttttatttcccgtagtgcgtatcattagatataatgtatagtaactttgcgctgcatgtttctaaattaattaaagcaaagatgtgtatttatttggctctcaaagcattgttccaataatagagtagaaaaataaatgttaaattgggtttattttttactgagattcttttctttctttatctgtaatacaggtacatcaagagagtgtacacatgattgaagtcacaagtaatttgattaatgaaactctagcaaatcaccctgagtgggcaaagtaagaatattgttttgaaaaagaagagagatgaatggcctagtttcagcatctgtttgcacgaaatgaccttcattgatgcagctgcattggaagataaaagatagggtttgccagagctttgataaatattgtcatttttgaagaagaatgtcatgtaatacagagggtgggaggaaagtgctcaggattttaggtacaattcatggtaaatgatactttgttttataattgaggtttacagcatgtttataatttacaaagcacttcatctgtcttatgtcatttgttcctcacagtgactgtgtgagatagattgaagaaattatccccattttacacatgaggaaacaagatcaaaggttaaggaacttgagataataattccgcagtggcagagtcatttataaccactgcttctgatcaactgaaggaaagtttccactataacatggaaactgtaactcctcaactttctatataatttttaaatttatgttatttatttatttttaagaaatgaggtctcaccatgttgtccaggctgatcttgaactcctgggctcaagcagttctcctgctttagcctctggagtagctgagactacaggtgtacaccaccatgcccagttttataattattgacatattcccatattgtattatttttgaggaaggataggtgaactatggcccagggccaaattcagccacctccttttgtgttggggaccagcctcaacaccacccgtagggtacctgaagttcggtggcgacaaaggaatgagaagagacaggtacaggttaagagttcatgaaggtgggagtcggggccagttgcataatggaggctgcaaaaggcgctgagctctggtctccacactgtttattgagtgtaatcacttagatctaaaaagcagatgttcagggtgaaaacactgaaagggaggcagtacatcataggtgtaatctatagcaatagcggtttaaatcaatctcctttgtgctcaaacagcatatctttaacttgttggagagtagctagtgggagcgggcttaactaggagcctgcacatctgtccacattccagtgtttcaagggagtgtctttctccttgaacacagtgtttacagataagagagcaggtcttgctctgagtatgggaacatgatggcaattcggagacttttctactcagaggcctctcatggctttccacaacttattgtcccatatttttgtggccagtttatacaggcaccccacaagcccttttcccaacactttggtaaatgaagttttagtggaacatacctatgtctactcattgacatattttctctggctgttttggggcttcaaggacaaacagaattgagtagctgtggcagagattatatgttctgcagagcctaaaatacttactctctagtcctttacagaaaaatttgccaacttctgttttataggatctctgtgtaatttggcttctggaagaagggttttcagtttttgtgggggatgttcagcagagctgtgttatccacctaacaacttgatgacacattgtatgacctgccttttattaacctcaagacagtcataagtcaggaaatattctgccagttttaggcttataagttgagatttaagttgatttttttcctttgcctctactttattcttttatataaaacctgcctaggacattacttgaacttgatttagaataaaattttttttttttttttgagacagggtcttgctctgtcacccaggctagattaaagtggcacaatcatgtctcactgaaggcttgatctcctgggctcaatcattcctcccactttagtctcctgagtagctgggactacaggcatgagccactatactcggctaatttttatattttttgtaggagtttcaccatgttgcctaggctggtcttgaacacctgggctcaagtgatcttccctcctcagcctcccgaagtgctgggattacaggcatgagccactgtgcctggcctatttgaatcttcataaaagaagtatatttcttttgaaatataaattgtggtatatttatgcagtggaatattatacagcattaaaaaaaatggactaatgatacatgtaccaacatggatgactctcaaaataagtatgttggccaggtgcggtgggtcgtcacgcctgtaatcccagcactttgggaggccgaggcgggaggatcacctgaggtcaggagtttgagaccagcctggccaatatggtgaaaccccatctctactaaaaatacaaaaatgaactgggtgtgtggcacacacctgtaatcccaggtacttgggaggctgaggcacatgaatcgcttgaactcgggagacggaggttgcagtgagccaagattgcaccactgcactccggcctggatgatagggtaagactatgtctcaaaaaaacaacaataaaaaagtaagttgagtgaaaaaattcagacaaaaagcccaaatggtacgatttcatttatttaaagttctaggaaatgcagactaatctgtagtgacagtaagattaatggttgcctgtggattggggtggagctctagggaggacatacatataggtgcaaggaaatttttaggagtgatagatatgtttattattttgattaaggatataagtagagaagtagaatcatcatatttcattctagaacaggcttttcagctgctttgtggagaaaagattgaaggtatacaagatgtaaacctttgagacaaattaaaagcttctagagtaaaccagatgagaagtgacaaagccctgaactgtagacagtttcagtggaggtgaacaggagggacagatttataaggtcttaagggggttagttggtgattaattggatataggaggaagaaatctagcatgacttatgtttctagctttggaaattagtgagtgatggtggattcaccaagacaggaaatagaagagcagatttggtagggaaactaattcccctgtttacctgttgagtttgaggtgactgttgtaagtagaggcatccagtaggctgttgactatgtaggtatgcggttcaggagagatggggtgaagttaaaaaatgggcagttgctgtgtaagtccaggaatcagatgagaggtctgggttggatcttgagttttgagaagcatcagcataaagaatgtatgtaaggtacagagaggatgtctggaggtgcgccctgtggatatcttaagcctttaagggtgagcaaaaaacaataggttcacaaaggaaaatgagaatgggctatgagaaaggtaagaggaaaaccaaggaaagagaacgttttgagacagtagtagtggtcagcaatgtcaaattgctgcagaaattttctaagagtgaaattgggtttagcagctgcaagagcagttcatttaattggtgtagcagaagcccattagattgcagtgtgatgagaaattattgggaacgaggaactagagaaagcaggtatagactgctctttcccaagtttgcctatggaacgtagctgggaaggaggtatagagcagttttgtttaattttttaagatggagaagccttgtttgtatgctccagggaaagaactggtagagtggaaggggttgtaaatattaggagagagataattcttagtgcatttctctgaggatgaagcatgagatgaatccatggcacgaatggaacagctggggaaagcaggtcagaatggatatggatataaatactgtgagttcagtggagcggggaaggcgggaaattaggggccatacatctttgaagtaagaagtgaggtcttctgtcctctggctctttggatataatacattttaaaaggagaatgggaaaaaggaggaaccaacatgtatcaggtatgggattttaggaaggagccacctgggatctaggcaagtggatagagcctttcataggatgatagaccttccaaatgttgtcctctagggctcagcctcagccctcacatccagagggctccttttctttgggtcattcttctgtactggaagtcaatgcagagcccttttgtaccggttttgaatagtagcagcattctctctgcaactgtatcaaaggcacacaatctgagcagccccagatcaggtagtagaagaaaggtttgtcttttgtttgaaattttgaagtaataattatagattcacagggagttgcaaagacatatacagggaagacccatatactcttcaccccatcccctccagtgttgtcatcttgcataactatagtacaataaaaccaggaaattggcattgctataatacactgaccttcagatttcatcctctatgtagcttcatgtcagctatcaacacactcagtacataactgttacattgcaggcttcctcatgccaccccttaacagccacacccatcctctaccctttccttcaatatttccctaactcttagcaaccactgatcagttctccatagctataaaatcattttgagaataatacgtaaatccagtcatggagcatgcagccttttgagattggctttttgttgcttagcataattctcttgaagctcatccaagatgttgtaggtatcaagtttgttcttttttattgccaattaatgttccatttaggaaggtttttgtttttgtttttgttttgacacagagtctcactctaacccaggctggagtgcagtggtgtgatcttggctcagtgcaaccttcacctcctgggttcaagcgattcctgtgcctcccaagtagccggaattacagtcatgtacgcactaccatgcctggctaagttttttgtttttagtaagagagggttttaccatgttggccaggctggtctttgaactcctgacctcaagtgatccacccgctttggcctcccaaaaggaaggccttttttttttttttttgagatggtgtcttgctctgtcgcccaggctggagtgcagtggcgcgatcttggctcaatgcaagctccgtctcccaggtgcacgccattctcctgcctcagcctcccgagtagctgggactacaggcacctgccaccacgcccggctaatttttttttgtatttttagtagagatagggtttcaccgtgttagccaggatggtctcgatctcctgatgtcatgatccacctgcctcggcctaccaaagtgctgggattacagacttgagtgaccgcgtccggccaaggaaggctttttgaagttgcttagactttggtgattcatagaaggtctgattctttttcagcagataggtggggatgggattggaaatagtaggggtcggcatgaaataatgataatggtttcctgcatctctcagtactcagtggattctgtcagcaggagggcagttgaccttgtaggggattcatgtagatactcctagtggagaagatacagttaagaataagtccagatgtcctttcttccaacttggtgtggttttatatggcccatgtagtcccttgacttctgctggatgtgcctcgtaagctggtgggtaaattagacagattaggatcatcttagtggagctctaaagaaaataatgatgttatacatactgattcttgtcttcggcagttgttagtcgggagctcattttctgctttctcctgacttgtctcaagcctgttgattcctgtgcctcaggaccctcattaggagatggcactgaaatggttctcagttgcacttatcccttcgcttacttgggagaaacccagtaggctaaactaagttgtttttaatcagggttgttctcttggtaggtagtaggtgatagagattaacctttacccaggaaggtgaaggcagaccagtctaaactgtagggcattggtttctgctgagggatccctcttgagtgagtaggggagttagtgataggctgaggcagtgaatctccaaggaaggagctcagttcaggggctgtagaggtgtaaggccggagtacagcccagctaaggcagctcctgtgtttctggccccatgtctcttgagggaggctgggactgagccagtacctctaccttgtccccaaaacagctcctctcatttgttgctcttaggaaacctgtgtgagtacattgggaaagtgttttcatagtggccaataagacgttttcccaggcccaatagacatttgtgaatcattaaggatctgtccagatacctctatgaatcttcacacttttttttttttttttttgagatggagtcttgcccttgccgcccaggctggaatgcaatggcatgatctcggctcactgcaacctctgcctcctgggttcaagcaattgtccttcctcagcctcccaagtagctgggactacaggcgcacaccaacacacctggctaattttttcatttttagtagagacggggtttcaccatgttggccaggctggtcacaaactactgacctcaggtgatccacccgcctcggcctctcaaagtgctgggattacaggcgtgagccaccatgccctgcccatcttcacacttttgaataacactacaggagagtgttatcattataatatataatatcaatataataccaatatatcaatataatatcaattataagttaccatataattgaaaatatttagcagtcccttcaagccactgatgaatgtataaaagagtaatttaaaagctacttaatttctcccgaatcacatttcagtttagtgacccagatttcctgtttatatgcttatactgtaaattattatatttgtgtctctaaacgtttgaaattttgtcttacttgctgagaaatttttttttttttttttttttttttttgagacagtcttgctcttttgcccaggctggagggtagtggtatgatcttggctcattgcaacgtctgcctcctgggctcaagtgattcctgtgcctcaggctcctgagtagctgggactacagttttgtgcaaccatgcccagctaatttttgtattttttagtagagacggggttttgccttgttggccaggctggtcttgaactcttggcctcaagtaatctgcctgccttggcctcccaaagtgctgggattacaggcatgagccagcgtgctggccttgctgagaaatgtttgagtggactgaggcatttgccaagaagtttcacagatactttatttggagtgtgggacaaactggttaatacttaagattcaacccactactggtttaatagtctactttttaatttattcaaaagatctcttatttttttctggttaaagaccactttcctaggcaccatgactttgtggctgtcagtggcaactgactttctctttatgaccatctttctcatacacagcacataaagttgctgtgagttgaggatgttgcacatttgactttacctaattgacccttttgtgttaggtttgtaggatgtgtcattttggggcctcaggaaagtaaatgactagcttctgcttgccttcaccttttggcttcactctggaatagttgaaatgaggactgttaaatttgtgaatgtcaacatctccagcgtatattattaagaggaacaatttagataatacgtgaacatattttctcttgtggaaaacattaggattgtgtaaaggattcttgattaaggtgtatggtacagcctgcttagtcaacagaagaatgaggaggccacctctcactgcacaacaagtaaagctgtgggctatagttccttgcatagttggaactttgctcaggaattctatctttaaaagatcttcagtagataaccaacttgaggataatgattcaccttcttcatttcctgcattctttctgatttcttcacttccttagattagtgattctcaaactgtagcatgccatcagtatcacctgcagggtttgttaaggtacagattgctgggccctagtcgtgttcctttttcagtagatctaggtttgggcccccaatttttcatttctaacaggtttccaaaaagttctgatgctgctggtttgtggaccacactttgagaaccctgtcccagatgttgaatatcccagtctcccagaaccattttctttggtgctgaataaggcaggtgactcaggacatgtgaacagagaaaccaggcagagtagaatgaaagggaggttgtggggaaagtgggtctaaaagctaaggaaacattgaggcctggtgccatggctcatgcctgtaatcccagaactttgggaggctgaggcaggtggatcacttgagatcaggagtttgagaccagtctgactaacatggtgaaaccctatctctactaaaatacaaaattagccaggcgtggtgacgtgcctatgatctcagctacttgggaggctgaggcaggagaatcacttgaacccaggaggtggaagtcgcagggttgcaccgagccgagatcgtgccattgcactccagcctgggcaagaagagtgaaactccatctcaaaaataaaataaaataaataaaagctaaggaaagattgaaaggacatcctgaatgttagagacttaggacagttaagcctggaagtcctgctcatgatgctttggtatctgtgtattggtgaatgatcaacagtctgtctgttatggattaagcatatcaagttcaaagcattattggtacactacacagaaagtgtacttttttcatttttttctttgttttacattagttggcttcctgaggctcaggtagtccaaagagccctgaattctgcggctaacaacgtgtatcagtatggacgagaatggataactcacaaggtaagggaagaaactttctttgtggctttctcttttcagggtctttactggtggttgcttgttgctttgataaaacataagtagaaatgctattcacagcagtaaataggcttaaataaacaggtaagcaacatacaatgaaatcttttgaaagatcacattgaataggggtagtaccctgaacaatctgagaggttggtcatgtactttttcaagatagatgtgattcattacttgtgagttaggacagaatgatcacttggtttgggtagtcaaataaggctttgtagagaaaaaggtattaatgcatattaaatcttattgtctgctgataactgtctttggcagtttccagttattttcatttaatatttgtttttttttcttttactgtttctaagaagcctgcagtatgaattattttgcctgctttgcagatgaggaaacaagactcagcaaggctgagtcagttcccagtggtcgtgtagtaaattgcagagcttggtttgaaactgaagcttaacttcaaatcctttgtttctactgtagcatgctcgcagtgtgtgcccagaactggattaagtgcttttgatgtggcacttgagataaaccttgaaggaatggcagatcaaggaagagtggattttaagaagggtatttgtgtgagccaagatgcagagacaggagtgtgcttgaagagatgattgagatgctgagacaggagtgtgcttgaggaaatgatcttgactgaagtggagggagctttgtgaaggggaaatgaatgatagaggaaaggcagcacagttaaggattagattccaccatatggatttgggatattctttccctccctagttttgcctgtaggaataaaggtaatttgcacttttagtatactgaaataattaggattatgtaagaatcgacaggatttgttgcagtaagacttgtgcctagaaaaatatattagtatgtgattccatattgaaaattcaaaaacaaaatctaaaaaaataatataatggaagatacgctgtatacacatatatggaatcaggctggccgtggtggctcacgcctataatccaagcactttgggaggccaaggcaggcggcggatcatggggtcaagagttcgagaccagcctgaccaacatggtgaaacctggtctctactaaaaatacaaaagttagccaggcgtggttgcgcacgcctgtaatccgagctactcaggaggctgaggcaggagaatcacttgaactcgggaggcagaggttgcagtgagccgagatcatgccactgcactctactctcagagacggagaaactccatctcaaaaaaaagaaaaaaaaattagatgagcttgtttacctcaaattagatggctctcaaatgatgttctgactatgcttcatgcttggttgcctctcatatgcagaggcatatcaggcaccaccaacagtacttgtgtttcagtgatgtgtagttttttttttctttttgtggagagggagtcttgctctgttgcccaggctggagtgcagtggcgtgatctcagctcactgcaacttccacctcctaggctcaagtgatcctaccacttcagcctcctgagtagctggaactacaggcatgcaccaccatgccctgccaatttttctgtttttatagagacgtggtttcaccatgttgcccaggctggtctcgaactcctgtgcttacgcaatccttccaccatggcctcccaaagtgctatgattacaaggcatgagccacgatgcctggccaaatggctttattatattgaatatttagttttcagtttatgaataaatcaaatataaaggaacaaatatgaacagatacgtttgcattgaatatgtctagtaactggttcacatatctgtaaggccagcatcaaataggcaaagagtaaggaaatagatgttgtaaactaacgtgggaaaatggtcactcctttcattaataaagaagaaaataataaataatggctacatttcacacctgttaaattccctaaaaattttccagttagttcataaggctttgaggaaattgggtcatttatgtaattttagaaagcattaattggtatatttcttattatagaagtcagtttaccaatgcatagcaagagccattaaaatgctcattttcggctgggtgtggtggctcatgcctgtaatcccagcactttgggaggccgagtcaggaggatcacttgagcccagaccagcttgggcaacatagtgagaccttgtctctacaaaaaataagaaaattagctctgtctggtgtcagtgcgcctgtgatcccagctacttggctgtcttaggtggcaggatcgcttgagtctgggaggtccaggcttcagtgagccatgatcatgccactgcactccggcctgggtgacagagtgagaccctgtctcaaaaaaaacaaaacaaaaactcattttatttggttgcagtacatttatttatgtcacaagtaaccctgcaatgaacatccatatatatccttaaaaactatgtaaaaggatgttcattgcagtgttactcatgacactaaaaattaggattcatgggtgggcgtggtggctcatgcctgtaatcccagcacttgtggaggctgaggtgggcagatcacttgaggttaggagttcaagaccagcctggccaacatggtgaaaccccatctctactaaaaatacaaaaattaactgggtgtgggggcgcacacctgtaatcccagctactcaggaggctgagacaggagaattgctcgaacctgggaggcagaggttgcaatgagagtcgagatcgcgccactgcacttcagcctgggtgacagagcaagactctatctcaaaaaaaaagaaggatttattgtatatccttagagtgggtaatgatcagctaataccagaacgtaatgaattaatataaaagtattaaagatgaaggttagtgatgaaggctaaagattgaatgtttataatgaagtagaaaaaattctaaattgtctctatgtaaataggcagaaagttgcagaggaaatagaaaaatggaaacaattgtattaaggaagtgggcctacaaacttctagaaattctttgggtttttgtttttttttctgagaccaggtcttactctgttactcaggctggagcatgttggcgtgatcacggctcactgcagcctcaacctcctggactcaggtgatcctctcatctcagtctcctgagtagctgggactgcaggcatgcgccaccacacttggtaatttttttgtatttttgtaaagatggggtttcgccatgttgctcaggctgatctcaaactcctgggttcaagcgatctgcccacctcagcctctgaaagtgtgaaaattgttttttatattataatatggttttaataataactaagtgggacaacattttataatgatagccttcctctaagttacgttgtctcagtgtacttgatttccacaaacccggggccagtctgatcaattgtaaatgagaccggacatctctcagcatgcaaatagaggaaggattcgtgtttatagccaacatcctaaaattttacttaaaattctgtggtaattcttaataatagagataaatgtaacatgagacatatgtataatggaaggtcactgggattacaggggaaagatttttctctggacaggtaagatcagataagtcagcaatcatggcttcatttgcaccattctctgatagcgtgaggtagctctcttagagacctaagaatagagcaaagaaaatagaagcaaaaacatgagaaaggaaatttactgggaatactcaggagtagatttaaggaaagaacgtaatatggctagagataaatagtctggaacatttttgtttgctttggaacaaatgtaaatacccagcatatattaattttactctgttgttgcctgaaatattgtaccacgtcgtatctgtgtttttttctagctccataaaattctaggagataaggtgaacaatactgctgtaattgaaaagcaagtactagaactttgggacagactgtatcactcttggtttgtaaaggtaagttattttagctaaagtttcctgttgtaaactaataaagtccttttattgactcatcaactagataggattatattcacagtgggatttcattcatggaaatttcaaaacagcaaaaccttaagcctcaggtcactaaaagtcagtgtgagttgatggttagtctccatggcagaacctgcctatctctctggtgcgtcagtattccatcctcagtctgttgtcacggacatctcatcccctagactagctctgtgcgggagaagtgtaatgcaagccacataaggtaatgttaaattttctaatacttatactaaacgaattttacctgttttagttttttagtgatattttatttaacccaatatgccccaaatactattattttaatatataatcattagaaaaaatttaataagatattttatatcattttttttccatatgtctttgaaatctagcatgcattttataccagcagcacatctcagtttttgagctagccatattttaagtgctcagtagccacatgtggctagctcctactggctactgttttagacagtacaactgtaggcattaataacttttctttgagaaagtgaaactgaatctaaacgcttagagatcttttattttttattattatttatttatttattttttgagacagggtctcgctctgtcacccagactggagtgcagtggtgtgatcttggcttactataacatactccgtctcttgggctcgagtgatcctcctgcctcagcctcctgagtagctgggattacaggtgcatgccaccatgcctggtgaatttttttgtattttttgtagagacagggttttgccatgttgtccagaccatcctatacactggatctggcagggcctgtgggctagcaggagccgtgctgtgtatagagtggatagagttggtggtgatgattctcagagttcatgtaaggagagcaagtatatatgtaagtctcttaatgtagggtggagggggaggagggctgattttaaatttgaatttgttgcttagtgacttgtttgggattatgtactcttgctttgggatgagttgaaggaagattgttagtttttatagatttcaaagacttgggaaaaaatattcagggaatatctaggtgagtatcatagatttgatcccatctgctgaaaaaccagataattagaaaggtatatctatttcttttgctaactctggggcttctgcttacaaatagcttttattacccctcacacctcctgagctttattttatagtagaggaaggtcagtgtttcataagcataggtttgttaagtggttaagtacaattgtcccccagtatcatgggtgatcggtcctaagacacccctctggtaccaaaatccagggatgctccagttctttgtacaaaattggcatatttgttgtctgggcctggtggctcatgtctgtaatcctggctatttgggaggctgaagtgggaggatcacatgaggctgggagcttcagaccagcctgggcaacatagtgagaccccatctctacaaaaaattagctgggtgtggtggtgtgcgcctgtagtcctagctactcggggagactgaggcgggaggatcactgaagctcaggaattggaggctgcagtgagctatgactgcaccattgcactccagtgcagcctggtgacagggcaagcaagacgctgtctctaaaaaaagaagacaacattcctaccatcatgcttgtctaatttttaaatttttataaagataggatctcactatgttgcctgggttggtcttgaacggctaggctcaagtgatcctctcgcctcagcctcccaaagtggtaggattacagatgagagccattttacctggcccttatctctttcaaatttagttattctcatatctctgccaatgtcttccagatagataaattctatttactgccttacgtttgcttgttatattcttctgtcctcattttccttaccttgtatggtaaattaaaaagaaaaatgagggctgggcgtggtggctcacgcctgtaatcctagcactttgggaggctgaggcgggcggatcacgagatcaggagatcaagactatcctggctaacacagtgaaaccccgtctctactaaaaatacaaaaaaaaaattagccaggcgttgtggcaggcgcccgtagtcacagctactcgggaggctgaggcaggagaatggcatgaacctgggaggcggagtttgcagtgagccgaaatcgcaccactgcactctagcctgggtgatagagcaagaccccgtcccaaaaaaaaaaaaatgaggaaaggaggaaaaagcaaagatgggaaatcaagagaaaggtggagggcctaaaaactaaaaaaaaaaaaaaaaaaaagaaagtaaatgctgtttagtgtgttgtagatactgagaaataagatgtctttgcaaatgtatttaggagggaagcactggagcgagacttagacaaggtacctagaatataaacaaaagaattttatatttcaggtctttaaatggagttcgtagctgatttcttttttcttttttagacagagtcttgctctgtcacccaggctggagtgccgtggtacattcttggctcactgcaacctccgcctcctggattcaagcaattctcttgcctcagcctcctgagtagctgggattacaggcacgtgccaccacgcctggctaatttttgtatttttagtagagatggggtttcaccatgttggtcagggtggtctcaaactcctgaccttgtgatccacctgcctcggcctcccaaagtgctgggattacagacatgagccaccgcacccggccttagctgatttcttaaataatgcaaagttcttttccttggagtacttactgaagtgatgaaggggacctgaagcaaaatgtgacatttatactttctgttctttagattaagatgggaatttcatgtctgcactgttttattccatagaatgtaacacactctggaaggcacaaaggacagaagttgcatgtcagtcgtcagaatagctggctgggagacattctggactggcaggatattgtttcctttgttcacgagaacattgagacatttctttcggtaagaaatagcatttatagttaagctgaagttcaaaataaaaacaaactgtaattccaagttttcttcatacactttgaggcctcatctatcctgtttttaacatcatgacatttacatatttgagaactctaaatgcactaggatgatgttcaaaagccataggcttcaggtgtcactcccttggtatttcccctgtggttgtagagtaactgagagatgaccaggatgtctccagctggactactggagaggcacctgcctttgtgttgtgcgaagacccttgaccagatggaaatatggttccagttacattggagggatgggatgtgttgaatgcttagcttgtcaccttcccacctaacctcctaccatgcatcatcacctctgcagtctgcagcattcctaagtgctaactactgctcctcctcattccataccatattttgtatggtgtcttgcatgtagaatttcacagagggcagttttcttgtgcataaacttgtgactttcatcaagtgaacaaaaattgaggtttgccgtgctaaactttttaaaattaattaatttttttttgagacggagttcattctgttgcctaggctggagtgcagtagtgtgatctcagtttactgcaatttccacctcccgggttcaagcgattctcctacctcagcctcctaagtagctgggattacgggcgtgccccaccacacccagctaattttttttttttttttttttttttttgcatttttagtagatatggggtttctccatgttggcccaagctggtcttgaactcctgacctcaagtgatctgcctgcctcggcctcccaaagtgctgggattataggcatgagccatcacacctggcctaaatttaatttttatcaaagtaatacatgaccataactgaaaaggcagcaacgctaaaagattttaataaacagcagtgccctgctgtatgcctcccaatttcccatcttttctttacaaacaactgccaattcttttagctttccctgggtatttacctctgaatttctaaaataatgtttatgctactctctttgttttgcagttttagatgttatcttttggcttcctaatgtggaagatgaagtgctgttaatcagatattgggcctttaacatggattccttaattttgaaagcctcttttctgttttctgtctctttgttttctttttctcctgagaaatagcttcaacttgcctttgaaacagtgattgaggccgggcgtggtggcttatgcctgtaatcccagcactttgggaggccgaggcgggtggatcacctgaggttgggagtttgagatcagcctaaccaacatggagaaaccccgtctctactaaaaatacaaaattagctgggcatggtggcgcatgcctgtaatcccagatactcgggaggctgaggcaggagaatcgcttgaatctgggaggcggagggtgcggtgagctgagattgcgccactgagctccagcctgggtaacaagagcgaaactccatcttaaaaaaaaaaaaaagaaaaaaagaaaccgtgattgaaattttcatttctgctatcatacttgcaatatccaatagctcttttttctgaaccatccttttttacttatttgagaatattactaataaaatatttaaaatgacttctgctctctctttgctctgagtttctttaaagtttgttttgctttctcttttgttacctgtctggtgatccttggcagtgtgttcctttttaagagtgcaacactaaaagcagctggaaggtccctgccaggtcagcctgtagaaaagcccattagcaggttccacccagtatcctggaccttccagttggctctttaatgccagtgcatacacaaaatagtgtatcatctaataatacctttgaatgtttgctttccccaaaaattcaggtgtgttaactaaaagttattgaatccctttttgttttgttttgttttgtgactgtagtcgttgaacttaaaagtgtctgttattgatgaatgaagtgacagtgttgaatcatattaagatagatgataaagaaacatgattaaattttataaattcttacggaaagagaagaggcagtttttgaaactaaaataacagttttgccatgtaatccctcaaaaagaaaagtacaatttctgtatccctaaacacatttaaatattgagtaatgaacagttcagggaacagatgattagtagtttttgtatgaaatgttttgtgtcaaatattgtgctaggtgcttactaatttccaatttaattctcccagtgattctgcaaaagtagtatagttgccttcattttaataacaaaaaaacaggctcacaggtgttaaatagtttgcacggtaaataacagttgatattcaaagtcagttcatctttccttggctccagaggccagactttttatataatgttgtattatctttcaaactgtatttcatcctctagagaactcaacatttcttagtctcatacctttatatttttatttgctttgtcagtttttttttgttttttggatattgttgtaaataggtggcttagggccagtctcgttcatgaaatcttcccagtgtatttcagaatacattgaggtttctctacattcagactccttttgcatttattgttttcacccttttgatacctgaacatattttaccttctttttcaatttttgacactttagtgtttgtacccaatcttctggactagattgtaagtttttggaggtagaaggaatctcatatatcactaccttagaatttagtatggtgttaggtcctcaattaaactaattaagagaagcacattaggctgtagtgcagtagtttgactgtggcttactgcatccttgacctcctgggctcaagccatccttctgcttcatcctcctccttcttcctcctgagtagctgggactacaggcatacaccaccacacccagctgatttttaaattttttgcagagatggggtcttgctatgttgcacgggctggtcttgagctcctgagctcaagctgttctttcacctcggcctcccaaagtgctgggattacaggcatgagccaccatgcccagccaataattattgttgtatttagaaatacagtggctgtgttgaaatggcgttttgaggtcacgtgactcatgtcccttcctttaaagataagaaagattggaactagagaagatagcagagctcatgtggtccattgtctccaggctccctcccaagtctctgaggcagacagaggtggctcagttctgccaggagagacatttttccttatttagacctctgcattcctgcaatgtcctcttcctcctttgtttttctaaactgttgcgtttgaatctccttcaccggctccatagaaggtgggctgatggctcttagtaagtactgggaaacgaagttaataatcaaaaggttgtttggtgagtggtggactcagagtaaagggctgcagagccactggagatggtgaggccttgttggtcagttcttatccacagtagagaccaccgttcatgaccacattgcttagttggttcagtaagtctcttgggctttttgtatgtttcataatgaactctttgtgatgttcttccagtacttacattgctattgttgattaaactgataccaaacctggctcatgttttctacttctgagttaggatccttttttttccccctcagagagagagtctcgctttgtcatccagtctggagtacagtggcacgatcccagctcactgcaacctccacctcctgggttcaagaaatttttgtgcctcagcctcctgagtagttggaattacaggcatgcaccaccacattcagctaatttttttgtatgttagtagacatgggatttcaccatgttggccaggctggtctcaaactcctggcttcaactgatccgctcaccttggcctcccaaagtgctgagattacaggtgtgagccaccgcacccagcctgagttgggatacattttgtctccataaatgtgttttgttttcagagtttcatgggccttgctattgtgcctgcctttacccagtttctcctctttaagcctgacatataaattaaaccactttactttaaggatttagttaatattctagaaatgtttcttcctctattttctccagttgattccctttctttttttctttcaaataggaaaggttacttttttgttgttggagactaccaatctaaaattagtgtatttagttaatttcttaagaattaccacaagatattttctctcagtgcaacccagaaactatttaaatttttttttttaataaaaattccaaaatgactgaagctgcaaaaagaatgcttgtcaaatcacaagtaaaggcattgttggcttgtttcttggaactgatggcattgttcatttattctttatcccacgaggtcaaacagtcaatcttgcacatttttgtaggcattgtgaagcattttcaagattttatgtaaggagtttttgtaaatgaaaccagcctgccggagttctcttatgaaactgagctgaggtttgcaagaaatgccaagggcaacaaaatatgcctttataaatggtacatctgaagtaggaaaggaatggagaagacttttcatagaacagatggacatatgacaaaaaccagaactgctgttttgggaagggcaccaaaacaaaaatcagatgttgtgagttctgccccacaacatttaagctctaagctctagttccacttactagctttgtgcctttgggcaagttttctaaaaatttgtgagcttcaaattatgtatgtataaaatagagataatatcatctgcatttcttcgttcacagcattgttgggaggtctatggaagcattttagaaatggtaatgggaggtgtttttctggtcattttgtttttgtatttttcattaagaggaaggatagtccacttaggaagaatagaacagataatataataaggggatttgagatagtaaatgaaatgtgcaggtatgctataaatattgtacctctcctttattaatatttaacatctatgagaaaccttcctcatgatatctggttctagtgaatgtgtaggtgacaaatcagctgaactcagtagacgtcaatatactggtcattgcctgtctcaggaaagatttttggcctcagagcactgctcttgtccctgtctgttgattgcttttcttgtgatttaatgaagtcattgaggtgatgctttttatatttgtagatagctctaagttggaaatggcaagggtgggggctaggcagccagtaaagcaaatactggaatttcatggcctgcacttaggatcctacaagataaatataaccacaggttgtactctagcatattccccaggaggtaaagtcatggcctgtgtcacataataatgtctctgttaatgatgggccacaaaatgcaatcatggtcccataagattataatactgtatttttactgtaccttttagatgtttagatatacagatacctatattgtggttgcctgtggtattcagtacagtaacacgctacaaaggtttatagtttaggagtagtaggttgtatcttacagcctatatgtgtgctaggctttaccatttaggtttgtatcagtacactctatgacatttgcaggacgaaattgcctaatgacacatttctcagaatatatctccataattaagtgatgcatgactatattttttctctgcttgcgatttttacataatctacaatgatgtgtgtgtgtgtgtgtgtgtgtgtgtgtgtgtgtgtgtgtgtgtgttttgagacagagttttgctcttgctgcccaggctacagtgcaatggtaggatctcggctcactgcaacccctgcctcctgggttcaagcgattctcctccctcagcctcccaggtagctgggattacaagcatgtaccacaccacacttggctaattttgtatttttagtagagacagggttttactatgttggtcaggctggtctggaactcctgacctcaagtgatccacccgcctcagcctcccaaagtgctgggattacaggcatgagccaccatgccccaccaattatatataaaatgttttaatcctgttttttaaatttagcatttcattgtaaaatattttcccatgttataacagtgatgtttttaattgctgtctatattatttggtgtggatttactattttctttactattgagtatacaactgtttttggttgatttttctttttttttttaattttcatttgaaataatcctcagttcttagcttttcagttcatggtactaaaacactgtattaaaagcacactagatggctctagaaacttttttcatgaggattggttctgatatccagctttccttcctcgtcagatcttggagtctctgtggatcgttatgagccggaatgtgagcctgctgttcaccactgtcactacactcttgaccatcctcttctacagcgggacagcccttctcaattttgtactctctctggtacgtccacatagataagtacacatcatatttccttccctgttaaagcatatttctggtttcatttgcaattgcagatgtctgtcttcctatagtttccaaatacgatttttttaggagatgttgtcctttgttttgcagataattttcctgaccacactattttatctattaagttccagtgatgagtactacaagccagtgaagtgggtgataagcctgactccactatctcagccaggtccttcttctaatattattggccagtctgtggaagaagctatcaggtagggataaggtttatgctattcttatttctcccagaactttttttccatgataagcctgttttttgtcatgagcatcctgataacattcagtgctaaactcgtgatggactctggtattttcaaggttttcatctcattttgacaggataaatatgaacagtgcagttgttaataagaaaaagattcaggccaggtacagtggctcatgtctgtaattccagcaattgagattgcttgaggcaggaagattgcttgaggccaggagtctgagatcagcctggacaacatagtgagaccctgtctctataaaaaaattttaaaaattatctgggcttggtggcatgcacctgtaaccccagctacttgggaggctgaggccagaggcttgcttgaggaacttgaggttacagtgagctgtgatcacgccactgcgctccagccttggtgacagagcaagatcctgtttctttgttttttggagatggattgcagtggtgtgatcttggcttagtgcagtctctgcctccagagttcaagtgattctcctgctttagcctcccaagtagctgggattacaggcgtgcaccaccacacccagttaatttttgtatttttagtagagatgaggttttaccatgttggccaggctggtctcaaactcctaaccttaagtgatctgcctgcctcggcctcccaaaatactgggattacaggcataagccaccatgcccggccaagaccctgtttcttaaaaaacaaaaaaacagactgggcgcggtggctcacacctgtaatcccagcactttgggaggctgaggcaggaggattgttcgagctcaggaatttgacacaacctgggcagcatagcgagaccttgtctctactaaaaataaaaaagattagccaggcatggtggtgtgaaagctgtagtcccagctacttaagaggttgaggtggtaggattgcttgagcctggaagatggaggctgcagtgaacttggtcacaccactgcactgcagcctaggcaacagagtaagaccctatctcaaaaacaaaacaaaatttaacaattcaaagcagttttgataaccttctctcaaacctgagatttacaaagatgtaatggtctatctccatcagctttccatcagcaggatcttagactagctgttagcatcatgtcacttgcttaagagaacccccgcttccaccacccccatctccaacttctttcagaaccctctgctgtcaggagttttagctttgctccagaaggagagtaggtggacttcctgtttctcctctgtcctacagccaagctgtgccctctgcaaggagtaggttggatactggaaatgcagaatcgttgtttatctcttaagttataggctctgtatgcactggaggttctggccagaaactttttcgttatgacttctggcatccatgtatttacaggctttgtttctgaatgaacttcttcaacttttcctctgtataagctctttccaggtcgttggctcttggcttcctttatcttttcctcttcatcatttctggtagggaggacccttttgcagagcaggcctgtctcagcccctcctgtaatccctgtcatcattcctcattaacaagactcaactacatttttacttcttatgaatacgtctcaaattaaaccctcctattgtccattagagctcctttttctaatacgttgttaaccaggtggtcttaagcatctcttgaatagcgaatctttggctggcatttctgtctccacatacttttaataaatattgtctggaactagtcttccacagaaatcttgatttttttttttttctctgataattgcacctgattgatcttggtatattttttcactgtgttcatgtaatagctagggagaatcccatttgattgttagaaaaccttcagttacattcaaacaggatgcatgctcctaaaatacaatgtctgtagaacttttgctaagttctctccccttttcctactagcaaggcctgggtaagatcttcaccaataccttgtttccgcgattggctgtcaagtgggattaaaaaaaatgctcttaacacctgtatagtgtcctcaggtatccacacaggggccatctataaagattccagatttgggagtatattatccagtgtaacagcaattggggtgaagctgtttcgaaggaagtaccagctatagcttccctcctaagtcctatatgaccattgactatcatctttgctgaataaatgaaatgatgaaaattctagcaatagataatcttttgtttatctaggtgatatctttctgactcagaaaagcttttgcaaatgctctaccaaaaaggaaggctaatcttttatcttcccagtggggtaaagctatttattgtagcagccatatcaaaggctggtaggaattctccagtcagtgtggcttaagccaagctttgcagaaaaatatctaccttgttcataaagaacttcaagaaagatgatgcttccattttcctcaagtaatcttcattgttactgactcttattcttagaaaaatgtttctattttcacatcacagcttttgaattttctcttgttctgctttcttacagcagaccatcctctaaatgtctgtcaccttttttcataccaaatatgccaccttttttgttttaaacttaattcctagctgttgtgtttgccagtcagtggtaagtaaagctgttagtcacacctaggttcagctgattgaaagcacatactctgttacaccatgatgccttctttcaagaggagctggttagggaagatcatgacttatatttgtggacataagagggtggcatttagaaattcaggtctttggctcaggagagaatttgagattacaaagagtgctgtcatctacagcgatatgaggaaatcagtcttttacaaattagattcgacttcccttcttgggagtgcatacactaattatgtattataacagtagcttatgtcttggttccatagtatactggcatttaaaaaccatttgttttattatcaccttattttaaatacagaaaaaattttaacaacctttggtaccagaactataatctaatggttctcagaattgatagatttttatgagtctgataaatatggtacagactaaagaatgggttatggcctgagacatttttctaaccaaagctatatcaagttatgtaattttaaggctataattcaaggtgttttttttgcagtttaagttcctagggctgtttctttactggctcaaattcaagacttaaaatgtacagattttacagagattcctctgaagagctttctcctgtggagaagatggtagtgagttctctttctaagagctcctgttggatttttcatcctgaaggtttgtgttgaagaggcaatatgtttcttcatggaaaaagattttgagggaaaaataagtggttatttataatttatgaatgactatgaaaatattgtaatgtcctcaaagtgcagtttagcctacaaatatcagtgataccaacttttataagcatcagtcattaatcatcatctatgttgcagctaagtggaaatcattacattcatttatatgatctgtgaataagtcaaaaatggaattgaaattgggggttaattgcatgaccagacagtgatagtgtctgttcgtgaagctttgccttctgaagtatgtggtttctttatgatcactatctcattgaagttttgaaccttactcattattttgattctgaataagtattcttctcagttgaatacatttgcaattgggttttcatttcatgaagttttgagtcagtggcatgcatcctttatccccagaccattttcctctcttcagcagcatgttgtctcctgaatgtatacatcacacccttcttccctgatgctcccattctgcttgctctggtggagatattgcacattactaagttgcatgttgtcacggcctcaatgcaatttagtgtgtgtgatattttcacatgagtgcatgcacacgggtatggctcttgcttgctgggattacagcttttcagtgccagtgggtgggtgtcctgatgaattagataagacagtgtgtatgccatgcgattctcatttggaaagtgaacatgcttcccatcggtaccttccaattttggagaattaaaagtatttggattaaaaaaagtcagcaatgatcatttagtaaatcagtgtttccattttttactttgagcaaatgaaatatttattacaaattctcattgatttaagagtataaacaatatttaaatgtataaggaagaatgtaaagctgtaagaaaatgtattttcatttatttgaagaaatctctcccaacactggaatagagaagcagaaatctcttatgcatatttggggaaattaaattaactggagttcttaaataataatcaagacagtaaaggtatgcttaacctacctgatgaaagattcatctcataaacttaagtttccaaggtaaattaccttaaaaatgtgtcttttactttctcattgtgatgcttcgaaaactgctaaattcattttagtgggctaataatggaactagttttgaaatacacgtttactatttgcctatgtaattgaaacaaccccttgttatttttttagttagcattagagtaagcatccacaatcactaggcattgtcaaggacacaaaaccatgtattactgtatgaaaatattgaattaatatttactactaccatagcctccagatgatctattgtgatgctgtcattgtatgtttctgtgtttcaccactgttttggagggtgagaatggaagaattccacgtaagcagctcatcccctgtgcccttcagcagctcggccgttcccctcatgctggaaatctaatgtcagccaggttgctatatgacaccctgtggagctgggtttccagggcagattaatcaagaaagggaagatgtgacctctcaagggaggttggggctgggaaggggtgggtagagagagatttgttaaaggatacaaaaattacttagaaggcataagttctaatgttctacagcactgtagaatgactgtagttcaacaataaattatatcatttcaagtagctagaaggaagatacagaatgctcccaacaaaagaaatgaggccaggtacggtggctcacgcctcaaatcccagcactttgggaggccaaggcgggcagatcacctaaggtcaggagttcaagaccagcctggccaacatggagaaaccccatctccactaaaaatacaaaaattagctgggcttggtggcatgcacctgtagtcctagctactcgggaggctcaggtgggagaatctcttgaacccaggtggtggaggttgcagtgagctgtggtcatgccactgtactgcagcctgggcgacagtgagactctatctcaaaaaaaaaaaaaaaaaccaaaatgataaatgatcaagatgatggatatgccaattacccctatctgattactatacattatatgtattgaaacattattatgtaccccataaatatgtagagagcagtcaagggagctggcgagtacttttcccactggttattgtatatactgtgtctctaaaagctgactggtctctcccaccagctcactttctacttgagacataccatattgcagtgaggctagaatactgggaaggggaatgacagtcctttagaaaagagggtggaaccagtgtaaggaaatgtggaggaggcagaatttcactttggactcttcactcctccttttcttcattatttatcttcttccttagacaggtaattcttactcagctgtggtctaaggccctgtgtacactgagtttatagagcttctggactggtttgttattctccccatcccactccttgcttcaaatatcattccattaaaagcaggtcatctgattaaatcctgaattgtcttgttatttttttcttactcagtttagaaaagtagcaagcacaatctggtttgtcagaaaagagagggttgagagctaaagttaagtatcaggaaacgtgtgaaaaagtaagtttcatcctaggatttataaaggatgaagatcaagagctggttaggaagagttaacattgtaaacaatcatttgaagtcaattcaagcttctggtgcagaggagttattattaaatatagttgtgtaaaggaggcatggatattcacacctttagtgccatacggtataaatatacagtaggctttattaggggaaaatcctagctgagaaaaagctgatcctaactaactcttggaacttttattccacagagaggtatgcttaggtggggcatagctggattggatgcacgatggcctaccttccaatggacaggaatcctgctctgtaatagtctatatatagtatgggacaggagaacatctctaagactgtgtagtaatgggaggtctatgaatagggaataggccttgttagaaaaccgtgcctctagctcagtggctggtgtgtcagtctcttcttccattgagctaaatcacgtccatctgagctaccaaaaggagggaggaaaagaacctccagagtctgtgaatttgattctcatcaactattgagtgctaggagagcttggactaaaattaaagaacaactgtcaataatctttgaagaatcactgaagaaaaaggtcccagaaaaccaagaaaaggcagatattttttgagacataaaggtggaggaagcgtatatagtccataaatattagactggtaaacttgatgtaagtgttctgtcaatttctgcagtaggtgcttgaccacatggttgtgagcagttacaaagggaagggtaatgaccattggcaccatggatcacacagcacaagtcatacatggtcacctttagggaatgccagaagtccacgtctatcgtgatgtttgcaagagatttgatgaactgtatcataatgtctttcatagatagtaagacagggaagtgtttactgaaattgactatccaaaaaatgttgactaactggttttatttgactttgggagtaaattattcctagcaatctctgaattttaggttccaaagaaccctagagacgagtgataattatatgctcagtattataggttatttaaagtaaccgaaccaaaacttgcatatgcacagcacataacagtggttggcacgtagtgggttgtgtgtgcgtctgtagtcccagctacttgggaggctgaggcgggaggatcacttgagcctgggaggtggaggttgcaatgagccaggattgcaccactgcactctagcctgggcgacagattgacacccagtctcaaaaaaaaaaaaaaaaaaaaaaaattgtcagctatacctttatttatttttaatgaaagaagaaaagttaaaaaaaaagttcttataagagggaggaagttctggaattaatgatgatagttgcacaaattgtgcgcatactaaaaaccactgaattgtatacattaaaatgatggaatttatgttatatgagcttcatctcaataaaaaaattttattagaaaacaaaggcaggagagtcagaatgaaggagacatgtggacagaagcagagctcagagatggagagagattggaggatgccacactactagtctgaaagatggaagatggggccatgagccaaggaatgaaggcagcctttaaaaactggaaaaggctagtccaagtgtggtcgtatttacaactaaatgatcacaaccagttacagattgctctgttccctctctgctctcactgctttacttggctagcctaaaaaaaaaactactaaaaaagaagagaaaacagattctcctttaaatcctccaaaaagaatgtggcatccaggttttaggacttctgaattataagataaaaagtatgttttaagccaattgagtttagggtaatttattacagctgcaacaggaaactaacacaacccactacatgccaagtacagttatatgctgtgcacatgcaggtagcataccggaaagttttggtttggttattttaaattgtaaggttaaataacctataatactgggcatataattaccatttatctccagggttctttggaacctaaaattcagagattgctaggaataatttactcccaaagtcaaataaaactttatctggcatataactaatggcacgcactatgcctggctaattttttgtggttatagtagagacggggttttccctgttgcccaggttggtcttgaactcctgggctgtagcgatccacctgcttcggcctctgacagcgttaggattacaggtgtgaactaccgcaaccagccagacaacaaataaaaatgaatgctatatatttatagtttgtaataaaatgttacattgtgaaatggttaaatcaagctaattaatatattcattacttcacgtaccatttttgttgtgagaacatttaagaggtactcttagcagttttcaagtatacaatgcattattattaactgtagtcaccatgctgtacaatagatctactgaacttatgcatcctaactgaaactttgtaccctttgaccatctctcagcccctgggaggctgaggtgggaggatcacttgagcccaggaggtggaggttgcaatgagccaagattgcaccattgcactccagcctgggtgacagattgacacccagtctcaaaaaaaaaaaaaaaaaaaaaaaaaaaatttgtaggatggcaaccacatcctactctctacttctatgagttcaactcttacattccacatgcagtatttgtctatctgtgctgtgcctggcttatttaacttaccataatgtcctccaggatcatctacgttgtcgcaaatgacaggatttccttcttttgggggggctgaatagtatttccttgtgcacacaccacattttctactaatagccactgcttattgagcatctactgtgcactaggtcagttactaggtgcttcagatgcattgtcatttagcttttcatgggttgaattgttcttcctgccagcatccactcacatgaaactgtgaggtttaacctcataccttgaggagatatgtggtgaggtaggaggcagtggcttctgggttggtgtccgtggactattagttttttcggaattgagagattaaagctaatattagttataaagttaaatagataccgtatgacccagtatctccactcctaggtatttacagacgagaaatgaaagcatatgtccacaaagacttgtacacaaatgttcatagcagcattattcataatacccccaaactggaaacacctcaaatgcccatcagctggtgaatggataagcaagttgtagtagatctacataatggaatactactcagtagtaaaaaaggaaccaactactgatatactcaacaatgttggtgaagctcaaaagcattatgctaggtgaaagaaacaccaaaagctacacgacaacgtgaatgtacttagcactattgaactgcacactcaaaatgattcagatgctaaatattgtgccatggatattttgccacaatttaatacaaagctatataatgtatggttgtgtttacgtgaaattctagaaaaggcagaattatagtgacagcatatctagtggccatcagaggccagagtttagggagggtttgacaatagaagggcatgagggaactttttggggtgatggaaatattctacatcttgattgtaatgatggttatagaatgtatatatttgtgcacattactgaattgaatgcttcaaattggtgagttttattatttgtaaatcatagtttaataaagctgatataaaaaagaagaaaaagttgctaggaatttgagggagttaaattctgttttctggtaaattgtaagaggatttttctctgctgttttatttataaaacttgtgtgccagatcacaagtaatgaggtagaggggaatatattgtcttttcatccctcactaggttacatgaatatgtttagtaactgcaaacaatatacagtgcatttaaaagttgccttgagaacattaccagcaaccaatattctcagcagtgaaagaaagaagactgctgtcttctccacgtggtccttactggattgagccttggttacttgccacccagaggggtgattgagttgcagtattctgttgcacctttgatgtcaacttatttttggcttaaattttttaaataacataaggttaaagaaaggatcacatctctatcttttcctcattgacctccctagttctagacaaattctatacttttttcctttctttttctctgtggtcgattatgtcattattccctccccctcaaaacctaccttctcccttggtctccgggaatactgcactctagtgattttcctcctactacggaaatgatttcattacctctctggctggtatttctttgtctttaggtcctttatgaaaacacaacctgttgccctattttctctccacttgcccttttaagatgtcctgtactcttttataattattctggtgcgtctcagatgtcttgttctgaattttctattaagccttgtctcttatttcagctacctctagggtattttcatcatcctttttgagttcctgttgcccatactaaacaaactgcccttttcttgcatgcctcttccattctggccttctccatgactttgagacactgctattctttccccttcaggtttaaaacctgaagctctgttgttttctttttgctctgtcctctctgtttagttgttgagcagatccttggtattttctttggggtctttcgcttccttttggtatttttgataccactttattctgggttcttgttgcagagtcatatggctcctttaagacgttctctagtgaaagccattggtccggatgacaaagcaggttttacaattggggagccactctgcccctggatccatgtcccagaacactactaaatgactaaatcactagattacagggcttcactttgctcctaacagtatacctcttgggatgctttagaaaagcttggtgtttctttttgcatgtacaaggtcacgtttgccgctaacgtcttctttttcaactacagcttttcttctgtagtgaccatatgagggtgctttccctgcacccctctgcaccaccccatagagtccaggtttttatgattttgtgctgccttgagattacttacgggttgccacctttgtgctctctgaacagttccttatttcccctccttatagtgctgcactgccttactaatcttccaactgaaaaacacagagcacctgacattgcagattttcatgtattgaattcctatattagtcaccaaatatatgtgtctgtttttatctctcttgtattttcctctctgattttactttggagttaggaatattttttttcccacaaattctctcccaatgacctactttctttgatagcatttgtaagagatgttactttgtaggcttagttacatagtttaagaaacataggaagattttgttaaggcaaagaaagatggtgaaatacaagttacactatcccttattggctctttccaaaaggggaggactggccacagcctgggtttcttagagtttaaactgtattcttggaaacatgttattcacgcttaattttctttccatttgttttggtggtgaaatatctgcttcagagtgaaaagttgatgaattatttcagagaatagggtattttaaggtgtttcagttattttttcatcagaaatttaaggaatagtaaacatatttccaaataaaacatatttcatattacataaagaataacttagtaaatgtatttaaagtaaggtgtttatgtttctttgaaataaaatgaaaatagcattctcaggccagcagaaaaactgaagctattacatgatttggaatcaagtggtcacgtgatttttctgaatcacgatatgacactgtttatttactctttctttttatctttgggcattccagaggggtgtttgatgcttccctcaaaatggctggcttctatggattgtatacctggctgactcatactatgtttggcatcaatattgtcttcataccatcaggtaacaaccatattgtaccttccactattcgctatttaaggaaagttaagccattttacatacatctaggaaatgtctacttcctcaagtttaaaaaactaaattttttggcttgagatcgaatctagtccacattaggaacagaaatatgatttgtaatgtgtttgtttattgctgtatccccagcagctggaaccatacccagcacatagaaaaaattgctgtattagtctgttctctcactgctataaagaaatacctgagattaggtaatttataaagaagaggtttaattggctcacggttctgcaggctgtacaagaagcatagtggctcctgctttgggggaggcctcaggaaacttataatagtggtggaaagtaagggggaagcaggcatgtcttacatggctggagcaggaggaagagaggggagaggtgctaccacagttttaaacaaccagatctcacgataactcattcattcactatcatgagaacagcacctaggggtgaaatccacccgccatgatccagtcacctctcaccaggttttacctccaacattggggattacaatttgacatgggattttggtggggacacagatccaaacccgtatcagttgccctacatgtttgttcaatgaatgaatgttctagcacttagcataacacctaggacataattggctctcagtaacgtttgaattgaactgattggcagggagcaacgtgttgtcaaaatagctttgtccatgagggattacatcccagggcaagatgaatgcttctgagggcacataagctgcctccatacctcttaagatctgttgtggtgcttcttctacttttccttcctttatttctatggctgcttgttttcctaaatatctctgccttccacatttgcctctaccacatccccccctttccctatttgtctgtgcttccttctacattgtcaagttcattcacgttcttctctactgtgatgtccacaaacctaccctctgacctgcaagcaccctgtgaggcgggatggtagacttgtcatatagatgagagaccagttttccaaggtcatgtacctggcttctggtaggaccagaactagaaactacatttgctttactcttaacttggagagaagccagatggaggaagagtgcttgaacatactgctctggaagggaatgaccttgaagcagggtccttcaactcaggattttttctgtttatttttattatgctgaggtttagaaactaatttctgattgggctttggactcagtacaagttttgacacatgttctgtaggtgtatttataggaccgtatattaactattgattgatagtagcaactacagaacccttgaattttattgcttaagaagagatccataaataagacacacacttagaaagatttttagtatcacattttaagatattgagcctttacttagctagaaaattcagttagatagggcatatcatttccctaatatttgagtttgtgagtatttaacttgttttgttggaagttgttgaggaggagctactgcttagattcttttgctttgttagtgttttgctgatgatgttaagttgtttttcttttactcttttttcagcattagcagcaatccttggagcagtgccattcctggggacatactgggcagcagtacctgcagttcttgacctgtggctgacacaagggttaggatgcaaggccattttactgttgatttttcatctcttgccaacatactttgtagatactgcaatctactctgacatatcagggtaagtaagccacagaatttcttattagtgaatcatccaggcatttccgtttttttttttttaaaggaggatttttttctcctgggggtatacaaaagaactggtagtaggaattttcagtgaaatagccttttgtgttcccacaaatgaaattttcattgaaaatagtattgtttacaaggcatgatattttggggttttttttttttttttggttgttgttgccccagagttccagagcaactttttttttttttttttttgagacaatatctctttcactcagactgctagagtgcagggtgcagtcatggctcatggcagccttgaaccttgaactcctaggctcaagcagtcctcctgccttgaacttcccaaggcactaggattacgggaatgaaccaccatgcccagccaatattttcttattacatatgtaatatttataatatatatgatgtcctgggttaaaaccaaattgtgaataattttctcttgatttagtgacatttaacctagaaaagaattatgaccagatgtacatcaaatattttaagtacagtgaacagttaatgattatttttatctcttctttggttttggagaaaatgttgttagattgtatgtctgaggatatccatgtgaaaccaaatctcagcaagttaatttctggcaagcagagctctctaaagatataattggaatggttctatgataaatacaggttaaatctaagtcagaatcaacactttagccatataatacaataaataaatgtctgtttttataggttttgacatctcttttagaaattgcattaagtatatcaagccagttctcagtcacattaaaacttgagagagaaaattaaaaagctgaacatcatagtgtggttaactagtgtgtcacagttgacatttgagcaggaataagtatgattaatacttaagtgcttttatttctttaaactttgctgtaaattttatattaaggtttacagctggaattaaagaaacactgtctttttttttttttttttttttttttgagacagagtctccctctatcacccaggctggagtgcagtggtgcaatctcgcctcactgcaaccttcgcctcccaggttcaagccattctcctgcctcagcctcctgagtagctgggattacaggcgtgcaccaccacacccggctaatttttgtatttttactagagatgggatttcaccatgttgatcaggctgatcttgaactcctgacctcaagtgatccgcctgccttggcctcccaaactgctgggattacaggcatgagccacgatgcccggcctaaaatactgtctttaaacgttgttattgggaaatgaaaggtttggcataaattgttttattttttaataggttaagcttttattcataaactcccacacgtttttattttttttaaaaaaagctttaaggctgagcatagtggctcaagcctgtaatcctaccactttgagaggccgaggtgggtggatcacttgagcccaggagctcaagaccagccggggaaacatggtgaaacccgttctccacaaaaatataaagattagtttggtgtggtggcacatgcctgtagtcccagctactcaggaggctgaggtaggaagatcacttgagtctgggaggtcaagactgcagtaagctgtgattgcggcactgcattccagcctgggtgatggagcggaataaaaagctttaagcatttttgatagttttccttgaatgtgttgtttagggaagaagtttacttagcaaacatggaatactgccctaaatcatttttttggaatgagaaagacaaacacattatgaatataatttattggtttcctgaagactggttctccacaagtcttactttgatttagctgtaatatagaacatccttccaggatatttagttatttgcccctcactgaattgttcttctcatctatgtttaaaactagaaacaaacagaatgtgacttatttcccagtccttctgatgtcagtggtcctttcttgtcattatcaatgtgctatgctactgtgttctgttttatttcattccgcttacataagtgatactgtaataagctggagggcatttgtgattctcctgtgaaatagaaatcttgggctttgtgacagatattttcctcaggaggccttttatcatcacctatgttaaaaactatattttaggaggttgccaaaagtctgacctatgagtaacagggatgctctcattgttgctgtcgtcatataaaagcataattaactgaattacatgctaaattgtgctcacttaattatccttgatggaggttaacttaacaggtgactcctaaccagtcccaagccaacattaacccatcataggcaggcacctgtaatgggtataaaatatctgttaacattgctggctttattctttcattcctggagctataaaaagaggcagatgtcatccataggaaaaacaattgttgcatctcaatattgttgcatctcaatattattgcagtcagtgttcagttgtatgcatcgaggtgatctaaagaaagctgataatatgctaaaaagcatagtgtattaaagaatgcacattgtattagaaatgtatttcagattttttccagtttttgtgtgttaaaggtcgtgctctttattccagaggtggccatccttacctgacaggcttggcagtggccggtggagcatactacctaggcctggaaggagcaatcatcggtcctattcttctctgcatacttgtggttgcttccaatatctatagtgccatgctagtgagtcccacgaattcagttcccacgccaaaccagaccccatggcctgctcagcctcagcggtgagttaaagcagaataatcataagctgtatttatacattgaactgtcctgtctctgtatttgataagtagcttcatccagacttgtcaggataaaggtatttgagtaccaatgctgtgataaaggttgcagaagacactaagtaaatacaaatcgttggcagagttttgggtttcatataccaagaaaatttaaaacctatattggggccgggagcagtggctcacgcctataatcccagcactttgggagaacaaggcaggtggatcacctgaggtcaggagttcgagcccagcctggccaacatggcgaaaccccatctctactaaaaatacaaaaatcagccaggtgtggtggcacccgcctgtgaacccagctgtttgggaggctgaggcagaagaattgcttgaacccaggaggcggaggctgcagtgagcccagattgtgccactggactctagcctgggcaacagcatataaaaaaaaaaaaaaaaaaaagacctatattgggtgagaattgttaatgtcttgaaaagccaaaaataaatttaaaaaatctaattctatgcgggacatggtataccagattgaaagagactcaagaaatggacaaccaggccagatgtggtgtggctcatgcctgtaatcccagcagtttgggaggctgaggtgggcaaatcacctgaagtcaggagtttgagaccagcctggccaacatggtaaaaccccatctctactaaaaataccccaaaaattagccagatgtggtggcaggtgcctgtaatcccagctactcgggaggctgaggcaggagaattgcttgaacctgggaggtggaggttgcagtgatccgagatcatgccattggattccagcctgggtgacagagcgagactcttgtctcaaaaaaaaaaaaaaaaaaaaaaaaaaaaaaaaaaaaggaaaagaaataggacaaccaaatgcattgcatgagtctgggatagatttctggattggggatgggaggaatatttctgaaacaattggggaaatttgaacatggaccatatgttaaataatatatcaatgttaaatttggtttaaccaatttaacaatgatacttcgataaccaatgatacaatgataaccagtcataaccaatgatattttggttctgtagaagaatgtcctttaaagatgacgtgtcatgatgtctgccacttatttgcaagcagttccgccagaactgggagagggagagaggaagtgactgtagcaaaatgttaacaattgttgaatctagatgaaagacatatggttgttaattgtaccggcatttcaattttgtgtaggtttatacatttttaaaatacaaagttgggaaaaaattatttgggacaccaatatagagttgcaacatgttattttgtaagtacagatattaaaataaaaagtactgttatctgctgtcaccagcatttcataaaataaattataatgtttgaaaatttttctcaattgtcttataattttcttaaatttctttaggtataatttatatatggtgaaatgtacatctaaatagccaaatgtacctctaaatagacaggttgattttttcatgtactcacacccatgtaaccactactcatatcaaggtatagaatatttttgttgttctggaaggcttctccctgcctcctctcagtcagaccccactgcctgctgatactctaaccatagtcacttttcattagttttgcctgtttttgaacttcatataaaagaaatcatatagtaggtaggtactcttgagtcagtcctcattgctcaacagtgtatctgtgtgattcattcatattgttggatgtttttctctgttcatggttcattcttgcattgttgtctaatcttccattacatgaatatattacaatctcatttaatcattgtaggactaatagatatttgggtagtttgcagtttatgtctgttataattcaagatgctatgaactttttaaaaaaaatttcttattttgccacgaacgtttttgtacatgtcttttggtggacatgcgcacagtacttactgtagttggacatatacctaaaagaggaatgtctggttatacatctggttttaagtttaggtggatacttaaaaacagttttctatgttatgtgccagaaattacattttaacaacaaaaaagaaggacagtctcagaataaaaagtaaaatgttttgaactttccggaaactatatggcattctccttgttatctgcaattggaaaacactagttttcctgccactggatattctcgtgtaatcaaggagtcactgacaagttggttctgacaatgcatttaatgaaaatattttatacttttatgtaaaattctttaacaacatgattctgcttaattttgtttttagtgttatattttgtgaagagagacattgtcctttaactcagaacaaatgcagtaaagtctctgagttagagctggttagggggccattttagccaatgcgtgatccttagttgatggcaggggaaaatcagtttttccaaaagaataaaaggagaggtgcttcggtgattttgacaagggccttcccaatttggtggtggtgacactatgatatccttttctgcctttgcctcttaaagacaagtgctcagatacctgagaagccagcggtgctcgaaatcaacagaatgcacttgctaacttgaggctctgttccatgggctcaccaaacacaaagaaaaaagataattgatcaatattttgctgttattttgagaaaaacttaatgatttcaagttactaaagcaagagttagtatttaaggtgaaatgaaagcaacttaaatgaattcttttagaggtaataaacctttttaactctttgtccttctaaaagtacaaaatgcttatgtggcgtggcagagtagaaaaagataacgtgaggacccatatagcctttgtctttcaaagttactcatgcatgagtttaaagagtcaaatttctacaaaactcagtgaaaaataaggacaataaggactttgccttctccctcttcttcctttttctaagaggaaccactttttgaccctgtattattttgatatttacctccatatcttgaagtgacgtatttatttctgatttggtcatatataggcatcatctaataacttccgacttggaaggttagaagttagctttcactacccattcccccaaaacaaacggtgatactggttagatcagtattcaggttttacattattatgactttaaattatattcatatttgagccttgtcatatattctaatatttctttacccatacgacttttgctttctcttgaattaataaagatactggtttttatttgctttgctttccatgtacttataactaatcccatctcaagctctgcaccaggcactcacctctccacttggtatgttcagtcgcaccaggcatagttggtcttctaaagaagactgtcctaagtgccctggtctgccccagtggagtgctgtccttttggcttgctgttcagcggtcaccttgggtattccctcaactctcccttgcattggaatccttatttcttataccctatataattttctttcttgatttcttcctttttggtggagcacatcctcttatagattttcgggaaaatatgcataggaggtaaattttgagggatgatgcatgtctgaaaaagcttttcctaatgtcaaacttaatccgatagctttcctatgtagagaattctatgcttgaaattttttctttaacatttatttcttcattgttttctggcttctaggattgttgttaaaagtctgaagcaatttttattatttattcttgttaatttgactgtttgaagacatataagatctttttgtttatctacggtttctgtcctgatgggcacttgctaagacctttaaaagtgaaaacttgtgttctggtgttctgacatttttcttgagttgtttcatgatttccttttcttctttcagaaatttattttattttgactttgaccctcatggactgggcatttcacattttacatcctttctctcttttttcacttgtgtctttttggctccattttctgggtgatttcttcaactttatcttgtagctttactatagaggtttccatttctacttgcacatttttttcagtttcctttattgaggtattatttccttagagtaaaatgtacctttttagcgtacaggtttatattttgtatgacatgtaacagattacacatttagcagcttaacgtacatttacgatacagcttctgtgggtcgggagttcaggcaaaacttggttgggtcctctgcttaggacctgaaaatctgcagtcagagttggggtttcatctgtggattggggttctctttcaagcagtcctgttgttggcataattcatttccttgtagttgtataactgaggctcatggctcctagaggctgcctctcttcataggcagctgataatttgggtttttgcttctttaaggccagcgggagagtatttttctaactttggtctctgacccctagactttttaaaagaagagctcgcctgattagacccagcccacccagcataatctcttttttttttaagtcagctaatgagggacattcattatatctgtaaaatccatccacctttgccatacatgttgagcatcccaaatcccaaatcggaaactctccagaatcagaaattttttgaatgggaacatgatgctcaaagaaagtgttcgttggagcattttggatttttttttttttttgagatggagtgtcactcttgtcacccaggctggagtgcagtggcatgatcttggctcactgcaacctctgcctcccggattcaaatgattctcccgccacagcttcccgagtagcggggattacaggtaggttcatgccactacgcccggctaatttttgtatttttagtagagatgggatttcaccatgttggccaggctggtctcgaactcctgacctcaggtgatctgccctcctcagcctcccaaagtgctgggattacaggcatgagccactgtgcccggccagcattttggattttagattcttggatttggggttagtataatgtaaatattccaaagtgcaaaaaagatgtgagtcacttctggtcccaagcatttcagataagggacactaacctgtattaacagaaccacaatatcaggtattgaaggtgtttggctgttggctcatgttaagaatgagacatggccgggtgcggtgggtcacgcctgtaatcccagcactttgggaggtcgaggtgggtagatcacctgaggtcaggagttcaagaccagcctggccaacatggtaaaacactgtctctactaagaatacaaaaattaggcatggtggcatgagcctgtaatcccagctactcgggagactgaggcaggagaatcacttgaacccaggaggtggacgttgcagtgagcagagattgcaccattgcacattgcaccactgcactgcagcctgggcaacagagcgagactctgtctcaaaaaaaaaagagtgagacactcagaagctgtggtggattgtgatatgtgttaccataatatgatgtggcagggccactgctttgtccagcccttaatgtcagtgattttggtcccctttttgggcttgtatattcctcaaagaaagagcttctaatctcctggctagagactaaaagcctggctgccagcctcctgggagccaggaggaggaaaaggtctggacagccttcaagatgtaaacatccacttaatctcccagtgttgggatggatgcccaccctcatttctgcctgttgtgcactagttcagacgctttttgttttaccttctccagaggggaaaaaaacctctagttttctgccaaggaggggagagggtggagtcagctgcttggctggggtgggaggtggggtgaggatatcagagggtgttgtcttactgctctttaaggaaactgtaaagcagtcctgtgtttacccccatctcccaccctacttccggagttacttgatgtcaccagttcctaaaccttatgggggatttcgctgaataaatcagaatgtttcctggcctttctcactactggtttaagatccagctttttagggtcttgtgttagtctgtttttcattgctataaaggaattcctgaggctagataatttatataaagaaaagaggtttattttggctcatggctcttcagactctacaagaagtatactgccagcacctgcttctggtgaggccccaggaaacttccaatcatggtggaaggcaaagggggagcaggtgtgtcacatggagagagagagaggaagcaagagatgacaggctcttctaaacaaactgctctcacctgaaggaatagagcaaaaactcatttatcattgttggggagggcaccaaaccattcatgagggatctgctcctgtggcccaaacacctcccactaggcctcaccttcaacattagggatcacattttaacataagatttgcaggggacagacagccaaactctatcacgtatgccaggtcatagcagtcccacccgctttccaccttcttagaatttgttgcttttgcctcttagttcttttttttttctttcatggcctttgctgtccgaggtgcagccgcactggctttccatcaggcctcagatacaccaggtgccattgaaactctgggcctttgtgcacgctgctttctctatctggataatcctccatctggataatcccccatttttccttcttaacgaactcctaactattcagatctcagttcaaatgtcagttcatcagagaagcgtttcctacccccaagattaggttatggcctccttgccagtttaatgtgtttatagtttgcaccttgtacttttttttttgtagtgcagttttcatttatacacttgattatttttctctctcccccatcccaacttgactatagttgctgttactgccaggaccaagtctattttaattactgatgtcaacctctgtcaacagtattttgtactcagaatgctcaattcctagtggaaggaatgaatgggctgtgagggaatagtatctacagaagcatgagctctgaaagggcttggctttttctaggaatttgtatattgttacagtgtgacagtagagaatagatggttgcattttattaagcagacatacctcttaattccacactgcaaaaaaacttgttagactactatcttcacacagatgaatgcccattctccctaaggaaagattgtaggaaggaagaccttctctgctgctcactgttgatagtgagaatgtagtggatacagcacagctttgggctcccaactattttggcctctgctgaataatcagaacctttcacttcctctgttctctattaatagtgggcttgtttagggagatgggatgtgtagggaaaggcaaaaacacccctgtagtcatgcatactttctggatttttggacaggataatcagacttgctttgatagacttctttcacttctactaaaaattgagcagcagtctctgaatattaaagcccagaaaatcctgtaaggcatatgtcccaggaactctttcagggatgctattctccatattgtagttttcctttgccctctgttacaccttgagaggaaggtgacaactggaatgtggtcctttaggaactcagctttatctttctctagggaagattgagtaacttgtggctgtttttgtacacgctttcttaacctgaggtttatatctttcataattaaataccgaaagtacaatcaaaaatgagtatccgctgggcacagtggctcatgcctgtaatcccagcactttggtaggccaaggcaggcgatcgtttgagtccaggaattcgaggccagcctgagcaacatggtgaaaccccatctctgggtctctgcaaaatgaagtataaagatactccccataaaccatccccgcttctgcagatctttacactaaccctaagaatttcacttggggtgcacttgctgtcattccactttagaagattgagaaaagagagtaaactggggctgggaagggagtacatttgatttactttctgttacttgaaaatttcctgaatctgctcatcctctttactcccagtggtgtgacccactgccaggatttcttcagcagcctctttactggttcctgcctccagtctggcctccctctagtctgttcttcatagtatagcttctctgatttttctgaaacataaatattctattctgctgctgcttaaaattcccacagtggcttcccatggccttcaagataaagctaacacattaatttgccctgtcagacttctcatgcctttcttctctctacttctccagattcatctctgtgctgtgtgccttgcattttatttttcagctgtattgaacttgttttagttaccagaaggcagtgtcatctttgcagtgttgtcccctctgtaaagaacaccacttccctcctagccaagtccagtatcatggtgtatactcaaagtaccctttttgtgagaaacattactgaaactctgaactaggtaagaagtccttgctgtgtccctgtggtatcttacacttctgttggaacttaatacgcgttttatagatgtgtgtttaattcattgttttttcccattagttggtaagctttttgaaggtgggagctatatctaactttaccactgttttaccactcctaacatggtgcttggcgcatagtaagtgctaggtgaagatttggtgaatttgtggattagtgaaaccaaaagcagaatacaaccttgaggctgataaaagacgatgggacatagtaaatcctagccttagaactttattccaaatttgttggaagggagggggtatgtataatagtggttgcatgtgctctgtcacaggattgtatgctggtgccggtgtaggaaatacacactcagtgctggggagccagctaagtaagttaaattagtcagttacaactttcaggcatccataacttaactctgcctgtctaggaggctggaagtcaacaagtcttgagttgttaaatcataaatgatttacatatttacatggagggaagagggtagggggtgaaatgaatttgtaaagatctcattgaaagtttggggcaagcagatcccaaaatattttcaaagagcaaggaacagtgagagactacactgcacaatccctgttgctctgaaaggaggtgtaaaatgttaacagtcctctagtcccatgtgaccacagtcacatgtggtcccattctgcattgcttattctttttttttttttttttggaaacagagtctcactctgtcgcctaggctggagtgcagtggcgcgatctgggctcactgcaagctccacctcccaggttcacgccattctcctgcctcagcctcccgagtagctgggactacaggcgcccgcgaccacgcccggctaattttctttgtatttttagtggggacggggtttcaccatgttagccaggatggtctcgatctcctgacctcgtgatccacctgcctcggcctcccaaagtgctgggattacaggcatgagccaccgcgcctggccacattgcttattcttagacgagaaattctatactgtgattccttgcagcataataatccttataatttgagaaagaatactgtatttagatggtttaagtaggatgttaaacattttcagaaaatagtgtcaatacagtatttgtttctaacgtagagagttatagttttatgagctttacttattagttagagctatgcctctggaataagccaaaaaccaaataatttctgcatctctagactatagatattgttttcctggagataattagaggtttgttcaagatcagtgttacttcagtagagttctgtagatacacacacctccccctccatcaatcaccctaacaccctacatacctagagagaacattgagatgaaagactcttagtaactgatctctaagcttgcttcaggttgttggttttctttgttttgtttgtttgttttcctgagtccttttggagactttcttggcctggagacaaaattgaatagtagttaggaatttcaaggttacagctaagctcacttgtcaacagagagcagtgactaggctaaccatagccttaatcttatttaatgtgtctttgccctgaggctgaaatcttcattcataatttagaggaaatgaatagttaatagatataaaattacaggtatctgagaaatttgaaaagatgtcagggaaccccgttgggtattagaaaatgctttgtagtattagccagtttttgactattgcttgcaaagattttccagggcttttcagaattaagtgctacctgaaattcatattgtctgagacagcagccagcttggcctgtagacaaatgtaaaaacacaaacttgggtgagactgtgaaaaatagctatctagagctttagttctgacaggagtgtgggggtgatttttttctccccagacaatttctcatgtctggagtcattttgattggcattctagttgaatagaggccggggatgctgcaaaacatcttataatgcagaaaaatttcaagattgagaaacactgatttgagatagatagatagatagatagatagatagatagatagataatgcatataaacatacatgtgcgtatacaaatcttcacctttggacttgttttcagaacataaaagtctttaaggaaagaaaattcatttcaattattagatcagccagcatctttaaaaatggttggtgtattcatgtcacacataaaccctctcaaagcctcaggagccatagccaggagactaacagtttttcaaagtagagctgtgctagtagaggcgtgcttcagagatccagaggcttagggcaccatccttgaaagagccttgagataactgaacatccttaaaggtaatttcttttctgtgacattttacctgttcccctcttgacactgaagtactttcctcattgagtgctgcaaggttagtctttaattgatctctgccttgcctatgggcctcctaaatatttatatgaattgagaggagagaaaaggagtaagggagggggcatgattgtggaattacatttgaagttcagattgtttattttatgagtttttaggtgattgtacctaataaaagctttttgttatctttagtttctactactgtgagctgttccttaggttttggaacacttactttatattgtacttcaatttattcctccttcccttcctccctcccttccttgctttttttgggggggtggtggtggtggtgcagggtctcattttgttgcccaggctggcctggagtggcatgacctaggctcactgcagcctcaacctcttgggctcaggtgatcctcccaccttagcctcccaaaagtataaaaattagccggatgtggtgtcatgttccctgtagtcccagctactcaggaggctgaggtgggaggatggcttgagcctgggaggcagaggttgcagtgagctgagatagcaccagtatactccagcctgggcaacagagtgagaccttgtctcaaaaaacaaaacaaaacaaaacaaacaaacaaacaaaaaaccaactgtaaagtcaaatatttttctgtatttctaatatgtggacttattgtaaaggagcaatataacttctatctaaaagaatggtaatagactgtgctttatatctgtatcactgttgcataaacatctggtcccagcctctctccatcctgatgtactgccagccttggtgtgaggcatttttgtctaatatgggtgcttgagctcatgttcattgataaattctgacctggccatttggctgccagcacagatgtaaatttagccaggtgatttatctcagctcagacatgtaaattatgtagcaaaagcaagctagctactacagtactgagatagacacttcatgtatgcagcagtcaggcacggtgctcagccaccttcatccagcccagatattacccgccaataacattgttcgcttagcttgtttaatgtgggtcagaaacagttcaagtacaaggtcacttgatgaaaagacctaacccatttttcctgcactgaaccacatcccttagagcttggactctctgttggattacgatttctattttgtaataaaatgtatccacttagcatttaatctttggtctcttagtggtttttcctctttaacatcaatcatcatatccacttccagccagtaacaaggtggaagagctgaagaagattgctcttctcttttaaggaactgcccagaagttgcacaacacttctacttaaatctcattaaccaaagcgtagtcacgtggtcatgtgtagtttcaggggagtctggggaaacagtcctttggatagatccagcaaaaagatggagttcttgttaatgagaatgagcaacaactagcagactttgaaacaatactcaatgaaaatcttaagaaaaaatagtgactatataatctcattagggctccaaaagattgtaaaaataggatactgttttatggtaatcaactaatcattccgtctttttttcttttaggactttccgtgacatttctgaagatctgaaatcttcagtaggttgatgtggtttcctctgcagtgatttttctaggaagttcaaatttgacagcgagttcagctcagctgtggccctctgcccttccagctgtgcctagcaagcaaaacccaggaaagaagcagaagcctcctggccttacatacagaatgcctggacaagagagaacttgctgcgggctgctttgtattttaaaacacagcttgagagttcagagttggtggtttgctcacttaactgttgttaagatggcttgaaaagtttcattttatacactggtaccctggcttgaaatttttccactttggttatctatgttactatattatatatttataaagttattttaagaactctaaactacctgctgttaaaagaatagatggtgtaattttttcctggtttaagaaatgtattgttaaacttttctaagacagtcacttttcaaggaagagggctttcacttttgagtgtgtagttgagtgagcaggaaaaatgaatcttctacccttctcccacaatgtattatacgctctttaagaaataataaatcataagtataagggtggggtggcttatttgatgttcagttttatattataaccctgggagatacaaagactgaagctcttcctcctcttccttttctcttcacgcttctttacactattgccaaattataaaacttggctgaccacgttgaagtgaaatacttattaagctgctatgaatggtaacagtatgataaaattcatgctgttattaggttttctccttccaggtggttgaagtgaaaaatctcaggtgtagcaatactctgatttgttaaatgtatccgtttcattatttggaactctgccaataagttagttttcagcagaattttgtatttatgtagtattttcccatctcttagcacagtgccttgcacatgactctaaatgaatgcttgttgaattgaattgcaactttaaaaatatctcagatatcacaataaccagcatagtgctttacattttacaaagtccttttgcacatactatttcacaagtacatcacatcagctttcatatagctttatattattttacatcagttttacactgatggagaagctaaggttcagaaaagtgaccaactcaaagtcgtaaagtgtagtaggatttggcctcagatctttgactccgttgtgtgcagattctgctgtattagtgttccttctaaatattgtatgcagttttcccagtgttacgagattggtgttgctatccatttgttgtgaatgaagacttgtcctatagtacatgacagggctgagagtggactgtagttcttagctgaaccctttctactgtttaaaacaatcatcaggcctatcctctgctcccaggggaatgtgggagagaaaagggttcttggccaggctgtaggtggtggctcacatctgtaatcccagcactttggaaggctgaggtgggtggattgcttgagcccagggatttgagatcagcctaggcaacatggcaaaaccccatctctacaaaaaaaaaaaaaaaaaaaaaaaaattagctgggcacggtggtgtggctatagtctgagctactcaggaggctgatgtatgaggatcacctgagtccaggaggtcgaggctgcagtgagccaagatggcgccactgcactccagcctgggtgagagagtgagacactgtcccaaggaaaaaaaaaagtgttggggggtagttcttaagcgttgaagatttcctttttggaaagtatttaaaggtagaaatattaataatttttcctaaaacatctccctaagaagtcactgataattataattagtttaaatttattcttacactacttaagaaaaatttcatttagaaaaggctaccatgagatcttttgactatatggagtagactgcatacagatctctttatttctattatgaatattttagcgattataatcagctattccactgagtattagatttggtcactaagtaactcatgtttttctttagtcaatcattcattcattcactaaaacatttgttgagagttggctaaactctagattctgtgccaggcactgtacagggtgatggagatcactcataagaaggcctcttgctcttagccagatcatatgtaatactaaatttaaattttttgcattaaaaggctaaaaaatcatttgtttttgttaattatatactggttgatttatagatgtaattagcacatattcataagagacaaatatatacaatgagttactatacatatacaaagtgattttagctgtataaagtgatattgcaaaaaactacagctaatgtttcttgctgggtaattattagcataaatatcaggttcttagaggtctttaagagaatactttagagctaccaaaattagcagcagtgatgtaatatcaccctgaaataccaggagcagaggtgccccagagtgcttcacagctatgatcaggaaacttgacctgccccattgctacagcaacggcataaggactaggaaggtccactagctggggaggtcttggaaccctccgagccagaaagaagcattccagcatgattcctcagatgcaatgaggaaggtttacagaattttcacagggcaacagagatcaagtggtatgaaaaggtaggagttttaagctcaagtctcaaagataacctacctttacattctcagtcagaatttgacccagaaagaggaagtttcttcaggaacagaccgtacgttgatgaagtagaagtcatttcagtaaaaacggagtacagaacttggtcataatatcttgcattttatagatttattaaagattagtttcaagttcacattcgctattcagttgtaaaccgaatggatgggaggggagaaaatacaagctctccacacaggtatgctcctctcttttctgagagagaaggcatgggattttcagcataaattccatgttatgtgagtgctgtttgagttctgaagttcctatcaatatctgttcctgcaagtgatctctgtaagaccaccttacatgctggtcttagttattgttaaaattgcaaggtttcttcacaccctctttgataagaagtgtttagctggcagagctttcccttgacttctgagtctagtgtgggttggcccatgacagtgggaagaaatccaacatgttacatggagaccttgtatgtaaacaaactctgtagcctttgaaagtggaactgctttttacagttaaagggctgctaaatggcttgcagatgagatcttctggctcaccttgatcttcacatgaacccattgtgacctatctggatttcctaggacctgtagtttccatttgggttatattagtgcctcaggaatgtgtcactactggtcaagcaatactcagaaattcaggctgtgaggggttagattagaggaaagtaatttaggtgagctatccagagctttcaacctcagggtttatagggaaaaaaaacaaaatacaaaaacccttaggacttctcatactctagccctgaccttgcagtctcctctgaggggcctcctaagacccttaaaataatattacaataggactttgagtgtgcatttcacagtggaaatagcctctggctagcattacttccaaatgctagttccagctaaaaacaagtactttttattagtttcttgtctttcaacattctgccatcaaaatatattcattttattaacttaccgattattgggaacctgcaaaaaaaaaaaaaaaaaaacacacatgctgtctgcagccactgtttggttatttttgatagtttaagagaattataaatcaagttgttctgtctactagagtcagaaattctgtgctagaatgggacttctaaaattaggtggtcctgtcactttctagagaaagacccaaattcataggtttaagtggcttgtctgacatacacatacagccagttagtaacagaattcagaatagaatagagttcttttttttctgtcagtccgttgttctacttctctttccttttcttcatggttgagcagcttttggcaaaatgtgttccatatagcagtagttccaagagatgttaatagatgtaagaaaaaaagtgtgtgtgtgttgggggtgggggattgcatggtcaattaaaatgaaggaatgctgagtttgtttccttactgtaggacttctaagagttttgaacatgctattacacattgtgaatttataaaaggggacaaacactgtttgaccttagactgcactccccttctttattcctcagagcatctcaaaggactacagggtcctttgagaaacatggcccttgatcaagtttacaactctttgagaagacatccctaatggaaatactgaatggcagatctattactgtggtaccatgtagtgtgtaataaatcttgaagtccagaaagcaagtatatttgctgtttagagctatacttaaggtatagagattcttttccacctgtggtgtgtaaaatcagtattgtgtttaattttgcaggtttttcaaggatcaactaatgtgcaaatacagtggtgatatattgatattacattttaataatgcttttgtatggcactttatagttttcagacaccttttgtaacagccctgtgagacagacaatattatccttattgtacagatgggggggctctggaggctctgaaaagtttttggtgatattcccctaagtttataccacaaaatgatggagccagaatttagttgcagaacttctgactccaagtccagagttctttactagacatctggtttcttactagctttttgctagctttttattttacagtgaaaagtatggaagcaaatcctgataattttggcttattatcaaatatcatttattttttattgcagagacccagcagatgtaactctcattgtagccatcccaaagaaaacccttctttgccctttgcagtgccacttatttaggtaactgaagtgtatttccagtacaatttgattttgaactaagatttgatatagagttgtaattgcttacataactctttgaaaatgtatcatccctgggttctcaggtgaaggaggcaattcaaaagtaaaaaagaatattcgaatacaataaataccctctgttctcacacaaatgctgtttcttagctaacttgctttgacaacctactgatgtaacttctttattaatgtgaaatatttatattttgaaataaaattactagtgttgaatgaatcatgtggtaaacttaatctcctgtgtgttgaaaaacttgatcttttgtgaagccaaagtttcatgaatccatccgtctcttaggccttctgttatgccatttcctccggcaccattgtgtacactgaattcttaggagatactgtcaacttcgtaagggaaggtgtgtccaggaagtggacactgggcgccttaaagaggtcaagggccctcagtgcacaggggaaggtggccttgtgataggtaaggaagtggtgagatggttggctgagaagaattggaagaaaaagttggattgaggacctgtcctttttgaatgaagaaaaagaagctgaagcttggctatcttcaataccaaagacagctgtgcagcactggtagattgatgaagctgaagctacaggttgaagcactgtgaagcgcctttcaacggtgcttgggaaagagctttctgatgcctcaggttgatgtacccagctcatcaatctggtgttatggaagaagaaatgatccaggccaaggtgtccgggtggactggccagcctcagattcttttttactctgacaggttctcactggcagatatggtagttgacaaaacattttttcatgcttctcagtctgttgcttaagtctggaattccttcacggcgtgcatactgctgacaacctccttttggccttgctcctggagaccttagaataggagtcttcagctccccgcccccatcgtggggctctgtgcgagctcagagttgtgcttacagaactgattcttacccttcccctcaagtgagttgtcagaaatacacacttggtgttttcatgcaatgaacagttatgaagaaactgctctgtgcctggcactaggaaaaaacttcgaaaaatagttttaagaagtagtgttgaacagtagatgaggctttttcatgtttcttttaaatttcttttgaataagtctaaacagtagtgtgaaagatatactgacttcctgccgaatacccagatactccattaatgattgcattatcaaatgtttccccttcaatccagctcaaagtgtttgtgagaaatacatggtgaaagaatgagcagggtggagtggaaattggaccttccggagaagccccaggaagacattaccactggaattcccgtcccaggggaaaggcccctcccaacagacttgattctggttttggtctaccagtttcaaccccagcacagcttccagaagtctttgcgggaattcagagctgatttaggacgagtcacctatcgagaggacgggaagctttgctggggacgcttgtctgtccaagtaagaggaggccatgtggctgtgtgacagatgtgttttgtttctcctcgccaccctggcgagaaggtgcctggaacccatggaaggggtctgagaagagataagggcggggccatgtgggggcgggacccggcttagggggtggggttgcagggagcccacaccaggctggactgcgcgggcggggcagaggccgggggtgggcggggacatacggtgacgggcgtcggggacgcagggttggcggcggagccctgggggggcgggcccctgggggcggggtctcggttggcgcgagtgtcctgtcgccgccgcctcgggcgggtgggctgactggcggcaggctcgccgcggcgcggagtcccggctgcgggatagaccgagggccatggccgcctctcccggacccgccggcgttggcggcgccggagcagtctacggctccggctcttcgggcttcgccctcgactcgggactggagatcaaaactcgctcggtggagcagacgctactcccgctggtttctcaggtaaagtggcgcctggcgcggcccctcttctccttcccgccgcggcccgcgatggcggccgccgctcgcacgaccggacgggaggcagccgctgccccactttccgcgccggcactgcggcgttcttgtcggaccgcctgtgtggggctccgggacgggcctcggcccgggcggcgagagactggataatccaaactccggcggcagggttgagtggactcggcagcaggggaggctgcggggcgggggtgccggcctgggcctttgcccccagtacctgcctcgggtctgcggctcccgggtgcccccggccgggcgatgccccctccgcggggcgagtggttgagcccagctcccgaggcagagaggacccccgcggggcccctcgctggtacttagggccctccacgataaccgactttgtcaccagttcgcagcctggtcccgagcccggctcctccgcctggggtattcctcccggcctccccgcccagcgtgcgctccctgatcctttgtccctccccgccgtaggtcagttcgctggcctcccattcatcccggccaccctaccccttcccctgaacctgctgctgctcacttctgcccgcttctgtccggcctcgtggaagagtgacgtggagactgtatgacagttaatccagatgcacaccgttttgccaagtcccgtttgggatgtgtgcgttactgtatttgccaatcagctaaccgacgccctgagttttaggaaagtttttgtttctctgagctgggttatatgcagcttcagggctagaattcctcacttaggtctgtggtaagatgccaagcactgtggggagtgaattctgtgccttcgggagcgcgttggcgatgtgtgactcacatctaggttgtaaccacttcgtgactcatactaggattaccaagattttagaggtagaagaaatcttaaagattatctgactaaaaattctttctttagcatccttgacacctggccaccagtaccctgcttaaacatgttcagtgaaggggagcctgtagctgttgcatagaattctaaatgctattatctcttctcctgcccagccctgcgcatatttgaaaacagcagttacacatgtccctggattcctgttatgctggttaaataaacatccctattttcttcaccttcgcatggctaacggagcagtgatgaatatatctgacactctccttcccttttcctgtgtctcattgaggctctgaccagtgggaaggggcactgggatccctcagtaatgtcagaccctccgctcctcgcctatctccactagcacaacacaaccaaaacgagaaacactggagcagttttaagaggcagagagataagagagtgatggagttcaagttgatagtattttatccattttttaaataacacctatgtaatgcttactatgtggtaggccaggttctaagcactttgtaaatattaactcattaattctcataacaatcatgtgaagttggtatatattctcgtggtatgggagaggaaactgaggaatagtgaggttaaataatttgttgttagggctttcaataagtgccaaactgggatttgaatccaggtaccctggctccagaaggttctctttgctacactatgctgtgtcctctctagagattagaagcagtaatgagatctagagaaaaagatggtacatagtggaaaaacaagctagaaagtcataatctggagaaatggcaacttttcacagtatccactgctaaaaatgtatcagtcttacagctctgcattgtgtaactctggggtaaaagaagccagagaagggtaggagagcagaggaagaaaagtataaatcactgctgagagttagaggtcaatgccaaaggggaagaatgcctgcctttttttttttttctttttccagttaaagccttgttcagggtcacagctgaggttttgcatcccacacattgtgtatctacagctacatctctaccacaacaccataactgatattcctcataattgactgtccttaacaagaaaaagttaaaatcaagaagtgtattaagcatggccagaatactcggttaacaaagcagggaagtacaatttagaatgattttaaagtttcagtgttaggagattaaaacagcagttctccagaaaactcatatgtccacaagtctcattttctgagaatgctgtattattacccaactcatgtttcaccatctcatccacaaggatattttaagcattttaagcaaggatttattgtgtgcttatttgttgctgttttttgaggggcttatattctagttggtagataggtcatgtatagaacagcacatgcaaagtgtcaaatgaacatcatcaatggtacatactctaaaagctcagagaaggcatggatgagtcagcagtgatgtcatggaggaggcagggttttgaggtaaacaagtaggactggcactatacggtttaaagtagacagtttctattctggtatcatctagcttcttctgactctccaagtgaaaagtcctgggttactggccttattctaagaatgcaagattttatcaatattagaaaaatgtgtatagttttttttgcattcacagattataaaagatgtattttcctaacaatgatgcagaaaaagcattcaactaaattcagcttctaataatgataagaagcacttagggaactagtgttaggaaaaagtgtccttaacctgatagagtatctacagaaaacttttacttaacatcatagcaacagtcaaatttaaaataaacatttcctttaaagccagaaaccagagtggggtgcctgctatgcttctactcagcactgcactggaaattctagccagtgtaatatgacaaggagaagaaataaaaggaataaatataggaaaggaaaaaccaaaagtctcagtgtgatataataacctatgcagaaaactcaaaacagtctacaagtaaattataaaaattaggagtgttggcaagttcactgagtgtaggatactaaaatcaattgcatttttctacattgataacaaacaaggcacaggcgcactggctggtgcctgtaatcccagctactctagtctcagctattcaggaggctaaaaaatgggaggatggcttgagcccagcagctgagggctgcagttagctgtgatcacgccactgtgctccagcctggccaacaaggaccctgtctttaaaaaataataaaaaaaaatagaaaaagtaattattaaaaaaatccagttatattaacagtaacagcaaaatatgagcttcctaagaatatgttgcttttgctatgtatataaagagaaagagctctatctctatgtatacacagcaaaagtggtcaaacttcatggagaaaatttaaaaattttatcaaaagccaacatggatctaaataaatgggagaaaagtactgtgttcaagcctaggttgacatattatagacatatcagttatccctattggtcaatttaatgcaatttccatgaaaatttcagcaagatttttcagtagaacttgataaaagtaattctgaagtttatatgaaagcacaaagggccaagattaggcagaagagaaacaaggtggatggacttgctctgccagatttcaagactcattataaaactatagtaattaagacaatgtgggtatcagaaca

SEQ ID NO: 848 - DNA, 4335 bp, Homo sapiens
agagtttagattgcgtccacagcgaaacctgcacaaacagttgtcaacagcggctgcaaattacaggcttatgaggaacgtttgaaaaatgccaagagttctttcctcaggccaaatactatggtagataaaagtatagcctttggagccagaatccctgagtttgaatcttgcctgtgccacttggtagctgtgtgactctggctgcgtacttaacggctctgtctcagtttttctgttggtaaaatgaggataataacaccttctttgtagggttgttctaaggattaaatgagttaataggagtgagccacttagaatagggcctgttatatggtaatctctatttaaaatcctgtcagatacaccaaagaaaacactttaaaaatatctgttaaataaatcagtaaaacagaatcggggcattggttctttaaaagtactcccccacggtattctagtatgcagcttgggttttaatatctgaatgtggcgccttttgggatctcgcctcgcgagaaattgacattaacgaatgagtgaaaggagcttcccccccccccccctccaggaagatatagaccctgcaaacttgttagcaggaccttgcggacaccaaggaggcggaggcgttttccccatttccccttcgggagttgtagtttcctgcaagcgcttggtgggtctgtaaaccagcggggaactacaactcccacaatctcgcgcgcctcccgccctgcctcccgcccgcgtttctagcccgactcccattaccgcccctcgggggcggctgtggcggaggaacgatggccgacggcggcggccctaaggacgcgccaagcctgcggagctctcccgggccggcgccgcgggtcccgcgcgcggtcgggccgagtggcggtggcggggagaccccgcggaccgcggcgctggcgctgcgcttcgacaagcccattaagcaggccttctacaacaccggggccgtgctgttcgtgtgcctgtgctgcggcgccgcggtgctggtctacttcatcctggaggccttcctgcggccgctgctctgggccgtgctatgcggcacttttctgcaccccttcaagagctcgctgacgcgcctgggccgccactggctgcagcgcctgcaccgcgcgcacacgcccatcgtcctggccgcgctgctcctgccgctctgcttcgtcgactacggcgtcgaggccctgggcgagcaggcgctgcgccgccgccgcctgctcctgctgctcggcgccggcggcccgctcctgtacggcctctactgcctcggcagctacttgggcgtgcaggtgctgctggtgcacgctgccacgctcatctgccgcgggctggactacttcagcagcctgtggatctggacgttggtggttggctatgtgttgactgtttcattcaagtggaatgcaagcactgaacgctacttgagagcagtttcaattcctgtctggattatattgctttttcatttagcatccctggctggctcatggagaattccagtattcctggttattgttttcctgatgtctgtgggtaccctctatgaaaaacagaatggaaaagagtcttctggggcagagttaccagggcaggttatctccatggcagcttctactctggcaaacttggccatctctatcacagggtatgaatcaagcagtgaagaccagccctccactcagcctgcagaagcagtggacaggggagaatccgctccaacgttgtccacctccccttcaccctcctccccttcacccacttccccttcacctactctgggcagacgaaggcctgaaataggaacgtttcttagaaagaagaaaactagtgacatctactttgtgtctctagtttgggccattgtcgtcatgcagatctggttgaacctgtggattgtgcagttgctgccagtgccgattgcagtctggatactcaaaaagcttgtcattcactttggagttgtggatttcctagagaaacgctaccatgtgtggtggggcattatagaaagcttcctgaaggagcggcagggagctctcgcgccttggcccattgtcgggcttggaaaattcttgttaaaagttgatagcaagctctggcactggctaaataagaagatgatcatctggttggagaagatgttagataaaataattagcattttcatcatatttttgttagtgataggaactcttcttttagccctactcctgactgcaaaggtacatcaagagagtgtacacatgattgaagtcacaagtaatttgattaatgaaactctagcaaatcaccctgagtgggcaaattggcttcctgaggctcaggtagtccaaagagccctgaattctgcggctaacaacgtgtatcagtatggacgagaatggataactcacaagctccataaaattctaggagataaggtgaacaatactgctgtaattgaaaagcaagtactagaactttgggacagactgtatcactcttggtttgtaaagaatgtaacacactctggaaggcacaaaggacagaagttgcatgtcagtcgtcagaatagctggctgggagacattctggactggcaggatattgtttcctttgttcacgagaacattgagacatttctttcgatcttggagtctctgtggatcgttatgagccggaatgtgagcctgctgttcaccactgtcactacactcttgaccatcctcttctacagcgggacagcccttctcaattttgtactctctctgataattttcctgaccacactattttatctattaagttccagtgatgagtactacaagccagtgaagtgggtgataagcctgactccactatctcagccaggtccttcttctaatattattggccagtctgtggaagaagctatcagaggggtgtttgatgcttccctcaaaatggctggcttctatggattgtatacctggctgactcatactatgtttggcatcaatattgtcttcataccatcagcattagcagcaatccttggagcagtgccattcctggggacatactgggcagcagtacctgcagttcttgacctgtggctgacacaagggttaggatgcaaggccattttactgttgatttttcatctcttgccaacatactttgtagatactgcaatctactctgacatatcaggaggtggccatccttacctgacaggcttggcagtggccggtggagcatactacctaggcctggaaggagcaatcatcggtcctattcttctctgcatacttgtggttgcttccaatatctatagtgccatgctagtgagtcccacgaattcagttcccacgccaaaccagaccccatggcctgctcagcctcagcggactttccgtgacatttctgaagatctgaaatcttcagtaggttgatgtggtttcctctgcagtgatttttctaggaagttcaaatttgacagcgagttcagctcagctgtggccctctgcccttccagctgtgcctagcaagcaaaacccaggaaagaagcagaagcctcctggccttacatacagaatgcctggacaagagagaacttgctgcgggctgctttgtattttaaaacacagcttgagagttcagagttggtggtttgctcacttaactgttgttaagatggcttgaaaagtttcattttatacactggtaccctggcttgaaatttttccactttggttatctatgttactatattatatatttataaagttattttaagaactctaaactacctgctgttaaaagaatagatggtgtaattttttcctggtttaagaaatgtattgttaaacttttctaagacagtcacttttcaaggaagagggctttcacttttgagtgtgtagttgagtgagcaggaaaaatgaatcttctacccttctcccacaatgtattatacgctctttaagaaataataaatcataagtataagggtggggtggcttatttgatgttcagttttatattataaccctgggagatacaaagactgaagctcttcctcctcttccttttctcttcacgcttctttacactattgccaaattataaaacttggctgaccacgttgaagtgaaatacttattaagctgctatgaatggtaacagtatgataaaattcatgctgttattaggttttctccttccaggtggttgaagtgaaaaatctcaggtgtagcaatactctgatttgttaaatgtatccgtttcattatttggaactctgccaataagttagttttcagcagaattttgtatttatgt

SEQ ID NO: 849 - protein, 863 aa, Homo sapiens
MADGGGPKDAPSLRSSPGPAPRVPRAVGPSGGGGETPRTAALRFDKPIKQAFYNTGAVLFVCLCCGAAVLVYFIAFLRPLLWAVLCGTFLHPFKSSLTRLGRHWLQRLHRAHTPIVLAALLLPLCFVDYGVEALGEQALRRRRLLLLLGAGGPLLYGCLGSYLGVQVLLVHAATLICRGLDYFSSLWIWTLVVGYVLTVSFKWNASTERYLRAVSIPVWIILLFHLASLAGSWRIPVFLVIVFLMSVGTLYEKQNGKESSGAELPGQVISMAASTLANLAISITGYESSSEDQPSTQPAEAVDRGESAPTLSTSPSPSSPSPTSPSPTLGRRRPEIGTFLRKKKTSDIYFVSLVWAIVVMQIWLNLWIVQLLPVPIAVWILKKLVIHFGVVDFLEKRYHVWWGIIESFLKERQGAPWPIVGLGKFLLKVDSKLWHWLNKKMIIWLEKMLDKIISIFIIFLLVIGTLLLALLLTAKVHQESVHMIEVTSNLINETLANHPEWANWLPEAQVVQRALNSAANNVYQYGREWITHKLHKILGDKVNNTAVIEKQVLELWDRLYHSWFVKNVTHSGRHKGQKLHVSRQNSWLGDILDWQDIVSFVHENIETFLSISLWIVMSRNVSLLFTTVTTLLTILFYSGTALLNFVLSLIIFLTTLFYLLSSSDEYYKPVKWVISLTPLSQPGPSSNIIGQSVEEAIRGVFDASLKMAGFYGTWLTHTMFGINIVFIPSAAILGAVPFLGTYWAAVPAVLDLWLTQGLGCKAILLLIFHLLPTYFVDTAIYSDISGGGHPYLTGLAVAGGAYYLGLEGAIIGPILLCILVVNIYSAMLVSPTNSVPTPNQTPWPAQPQRTFRDISEDLKSSVG

SEQ ID NO: 850 - DNA, 114454 bp, Mus musculus
  misc_feature (1)...(114454): n = A,T,C or G
tgccttagctggaatctataatcaggcaactgactatttttgagctaggggtctctagcccaggctggcctcatccttaagtagttaaggaggaccttgaactgtgagctgctcacctccaccctctgagtgctgcaattacagatgtacaccactctgtctggtttacagtgttaggaatggtatcaaaggtcttgggcatcctaggtaaacagtctatcaactgagctccatgcccagcccctgactctagttttctagagtggcctacagcccttgctccactgtttagagttacacagagtaaggagttgtgccatatctagactcccggtctgtgtagtgggggctcatctgtggacctgcagaaccttctgtcacctgtgttagagccctcaggaggaagtgagcagaacacacaggaacaggcaccatggctctgagaatgaggaattcagaggcttggggaagaagccagaactttgccctcagaacccagagataccatccacttctcctctgttttagaacttttcctgcacacttacagccttttccttattgctatctgtggtagtttgaataagaatggctgccacaggctcacaccataggagaatggcactatttgtgaaaagtcgggggctgtggtcttgttgaaggaagaaggctgtggtcttgttgaaggctgtggtcttgttagccgcactggtacaatgggaccgtctgtgctggttagtttttattgtcaatgtgacccaaccttgaatcaatggaaagagggaacttttttttttttagatttatttatttattatatgtaagtacattgtagctatcttcagacacaccagaagagggcatccaatctcattacagatggttgtgagccaccatgtggttgctacttggggtgggctttagctttcaaaagccccccaccccagctctccccacccacctctgcctacacatcaagatatagctctcacctacaactctggtgccatgctctctgccatgatgataattgactgcacctctgaaagtgtaagcggttaagaagtctggtgtgagcaggagggaatgaaagcacctcttgccaagtctgacagcctgagtttgaaccctgaaacccatatggtaggaggagaggaccagttcctataagtcgtcctctggttgtcacatttgtaccgtggcacaatcacagacacatacacacagacacagacacacacagacacacacagacacagacacacacagacacacacacacacacacacacacacacacacatgactaatagtaagcctgtctggcattagccgcactggtacaatgggaccgtctgtgctggttagtttttattgtcaatgtgacccaaccttgaatcaatggaaagagggaacttttttttttttttttagatttatttatttattatatgtaagtacattgtagctatcttcagacacaccagaagagggcatccaatctcattacagatggttgtgagccaccatgtggttgctgggatttgaactcaggaccttttgaagagcagtcagtgttcttacctgctgagccatctctccagcccgaaagagggaactttaattgaggaatttcccagatcaaagtgatctgaggctataactgtgagagtgtgccttcacgcatgagtgaagagggagggtccagtgcattatgggagacattatccctaggtaggtgagtcccggcagaataagaaatctagctgagcaaaacaaaaggctaaacaatgaacattattccttcatggcttctgtttgagctcctcaccctgacttccctcaatggtggactgtgacctagaagactaagatgaaatatatatataacctttcttctctgatttgcttttggccagggtatttttgccacagcaatagaaagcaaagtagacatcattgaaggctgggcttttccacttacacgtacagctatcctcagggtatcagggatggctccgtcaggaccacaggatggctgccgtggcaccaggcatcagtctacacaggactgcatttgaaaggaggagacctggcatgatacaagcaagaaggtaatgaaacatcgtaggagactgatgacagggcagcttttggttttagctgggaatggcacccaggctcacacatgctaagaacacattcttttttaactgtttgaggatttcatatatgcttatactgtgttttggtccactcactcccctcccctttaacgccttcatactactccctcccagggttggttgtgtatttgttttgagagtcactgaatccactcagtgctgctagttgcgcatgggtcgcctcttggggtcggactgcatcgctgaaaaacaagcacatactcttaccactgagccatagcccagcttcctagctttatctaaagtagcctgctctcagactcaggcgttcaccaacatgaaaccaagcagagaagagtactggctgattgacatccaccaagtggcttagtacttctgggatggcctcacctcttcattcataaagcgaggaacacagagtagatgcctcttaaaaacataaactttcccattgcttttatttattgtgcatcgtgtgccccggcgtgtataatggggattataagacagcctgcaggagtcagttctctccttgttccacgtgggtcccaggggttgaacttgggtaatcagttttggcagcaagcgtctttacccccctgagactcttcctgggcctaaaacataaaattaatgcaacagaccgtcaaggtttgcaaatcataagtggtctacttaaagtcttacaaataggggctggagagatggctcagcggataagagcactgactgctcttccaaaggtcctgagttcaaatcccagtaaccacatggtggctcacaaccatccataacaaaaatctgatgccctcttctggagtgtctgaagacagctacagtgtacacataatcaatcaatcaatcaatctttaaaaaaaaagaattcaaggttctttaaaaaaaggtcttacaaataacaacctgatggttcaggaactgaatgttatcggtacccctagaactccctttaggtgtaagaaactttctcttagcactatatgttaattttgcctgctttgaattttatataagtagaatcacatagtagatattcttttgtgcctggcttttatcatcattataattgcgagactcattcatcatgtattccttccattgttatggatatgtaatatgttattattcaaatatgccatgtttacttatgcattacagtgttggtaagtcatgtgagctttttcctagtcttagctgccccgctttgtatgtgcgtgtgtatatgtgtgtgtgtgtgtgtgtgtgtgtgtgtgtgatatatgagagcatgtgtttatggaggccacagggagacatcaggtgtccctgttgtatcattcttatctgattctcttgacaaggcctctccctgaacctcgaaccagccgcagccagccatttttactctcatgcctatagtgtagggttataggtagcacacagctgggttctaactcaggccctcatgcttgtgcaacaaacactcttattggctgagccatgtctctaccacaattacctagtgttgtgattcatcttctggcaagtatatgtatgcctccctatgcctgcccaacatctgtccctctttctctgcctcctcctcatctcttgtccttctcctcctcctccctctcccccttcctcttctcctctttcctcctcagattttttttttttttgagacagggtttctctgtgtagccctggctgtcctggcactcactttgtagaccaggctggcctcgaactcagaaatctgcctgcctctatctccccagtgctgagattaaaggtgtgcgccaccacgcccggctcctcctcagatttttgatatagggtttttctatgttgtcctgactgtcttggaatttgcaggcaggcctcctacctctgccttctgagtgctggaattaaaggtgtgtccccaagacccagaactttctctgttttgagacatcatctccatatatagcccagactagcctggaactcactttgtagtccagactgttcttcaactcataatccaccagccacaggcccttgaaatcatagccttgtgccactacacctagctgtaatacttattcatatgttttctgttttataggggtcatataatgtgtgagagttcaacttttagatgctttttagcgacatttcctagtgatgagcctcaatacacacatgcacatacattgctctcatactcacacatgcgtgcccacacatgcatacacacacacacacacacacacacacacacacacacgcacgtgtgcagaggggcagctaaaactagaaaaaaaacctcacatgactcttaactagttcttggctaaatagacgtttgagtcatagaagatgtcatcatgagccatacccactctaaccagagaatcactgctaatccaagtcaatgtcagcatttccaaatgcttgttagctccatgacttctccagcctagactatgctgagcagtcacaacaaaggagcacacgtccatccctacctcactcccagccaacacttgcttgaagagagctggagagcagagagccttaggttatggcagcaaactgcatttctatggccagctgaggcccgcacctaccaagagtctaccgctgagttctagaaaatatcctttcttttgtgatacactccacaagctgagatatggaaggagttgactcacagtctagttcatctgaatgttcccacctgctctctctctctttgtgacagggtttctctgggtaattctctggaatttgccttttagaccaggctggctttggactcatggagatctacctgcctttgcctctggcgtgctaggattgaaggcatgtgccaccaccacctgacttcttctaaaatttaaacctgctaaatgttcaaaccaaacaaaccaccaccaaaacaagctgtgatagtttgagggtgggtctgagatgcagctcagttggcagagagctttgcctagcatgtgggaagcctctgtcccatctccagctcctcttaaaccgcgtgtggttcaagtaatccagcacttgggagactgaggcatgaggatcagaagttcttggctaaatagaagtttgagtccatcctggaacacatgagatcctgtctcaaaaaatgcggggagtgggaggggctggtggggaagagtgcttgctggaagacctgagttcagcacccatattaaaggtgggctgagtgcctgtaacctcagtgctggaggtgggcagcacaggtggaccctaagagcatgctgcccagctagcctggctgactgacatgttgggcttctagttccctgagagacctggctcacgagagtaaggaggaagacacctgacatcctcttctggtttccatgtttatgcacacggatacatgtaaacctgcacacatagacccaaacgaaggtggacttctagcctccccccccccaccctactctgtgcttctgtgtgtgtgagcatgtatggaagcaggaggtggatgttgggtgttacctacaagcaattactgcatcatcattatcatcagattcttcttcttcttcttcttcttcttcttcttcttcttcttcttcttcttcttcttcttcttcttcttcttcttcttctccacctcctgccccctccccctcctcctccccttcctcctcctcctcctttaacagagtttcaactttaacctggagctcagggatttggttagcctggctggccagtcagcctctaggatttccttgtttcccctgctctgctgttgcatctgacttttttttaaaggatttatttatatttgtatgtgtgtgagtgcctgacaccaattgagactagagaaaaacatcagatcccttggaactggagttacaggtagttttgagctgccacatgggcgtgcaaatcaaacagggtcctctgcaagagcagcaagtactcttaactactgagctgtctccccagctcctacatctgggatagttggatctgaactcaggtcttcatgcatatacagcaagcactttgacccaccccaccacagtgtttagatatggacaggtaaaatgatcctgtcattcaccccaaaactcatctgctgcctctgaaacgcgatccaatttcttgtctgcaaaactcttccgattctggcttcaagcagatttgcttctttctggggatgtcaccagctgaattaaactgcccacacaaaattctctctgttggggttttgccttctcagctgggttaccccccccttgtttgagtcagccttctgtggtttgttacatgtcactctgaatgtcctctgaaaacctcctttgtcctcaccagtcatccactttagaagtggtggcgttattttgaggcagggtttgggatgccatatagaataaagctatgattgtattaaacgccagcggaggataagcagctaatacaaacaccaagcagtgtgcctaagcacctgctgtaccaagggagaagatgggacaatgccttgtcggtactgagcactctcatgcagtcctggcagagttgccagtaagggtgacatggttcttctttggcaaaatactaaattgtggggcctggggccctatctcctgataggtcccaggcttagtgcctgccactccgtgtggatgggaaagggcccatgcgactgggtcttgcttcaaaggtggatagtttattctggggcgagtatgtccggccatgtcctgaggaacaaaatgggttgggggtactctgaaagacatgctctactgtgggagttaatcatatatgttttaaatcgagacagggactcactatgtagccctggctgtcctggaattcacttatgtaggccaagctggtggtgatatcagtgaggcaggctatagcagagttggtggtgatatcagtgaggcaggctatagcagagttggtggtgatatcagcgaggcaggctatagaacagttggggacatctctgctacaggccccagatgttctctgatgaccggtttttttttttttttttcaacttttgggtcggtgaagctagtggcttggtgagttaacacatcataaagatttcatttgatagtgaaaaggaagttaggtcagacacagagattagtaatttgtgactttttgtttttttaaagagagaaacagggtttctctgtgtagccctggctgctctggaactctctttgtagaccaggctggccttgaactcagagatccacctgcctctgctggtactaaaggcatgtgccccacccttagcaataaatgactaagggaactaaagatagataaagatgatctgcaacattctaacactacaagtttactttgtggaattactttgtgcagttcccaggatgtttggggattgtcatgacactgggatatcccacaaactcccgtgtctttcacagaactcagcctcagaaattcaaatttccctccatacatcctaagccacatcacagccttttgctctgagaatcttgccgggcttcctcttttctaccaccttgcactagacacagagtcacatgctcggggacttgggttatttcagaaactgttcttcactgtaaggagcactgaaatgaatcaggaaatggtggacggacaggcaggcctcagctgaaaatgaacgctggaactttccaccaagattatttcccatagttcactttctttagttttgatgactacctcttcttggatcattgtggtcagatgcctctgacagaccaggaaagtaaataaagaaactttccctttaggaacctggtccttccttccttccttccttccttccttccttccttccttccttccttccttccttccgtcattccttctctctctctgtcgcttgctttctttctttctttctttctttctttctttctttctttctttctttctttctttctttctttctcctctctcctcctcttcctccccatcctctgtggggagacatgaaacagtttcattctgactcaaactaaggacatggagtttggaatgcatcatataattaaggatattctgtggttgtcgtttcataagaataggagagaaaaacctgagggcaaaggaagggagttaacatttgaggagctcctaacactgagcaaaggcctcaagcctgggagtcccacagtgtctcatggatggccctctgcgtccctctccctacctggcaggctgggagacagttttattttattgtgtgcacatgtgaggggttagagggacaacgtttgaggagttggttctttcacttcacctcattgtcaaatctaggttctgtataaaagcagtgttgttttaaaaattttatttatatgagtacactgtacactgtcgctgtcttcagacacatcagaagagggcatcagatcccatcacagatggttgtgagccaccatgtggttgctgggaattgaactcagaacctctataagagtagtcaatactcttaaccactgagccatctcttcagccctacttctgtgaaatcttaagagcaccattatgttgaggtggcctaattgtttaaataaataacaatattcaagaagaagatctgccagatatctatagatcagtcgtttctagttatatttgtattgtttactttaatgaagataatagggtatgcaatagttttaggcagctcctagatataaatgaagtgacaattttgcccaactcaggagatcagaccctagcactcccatgaggcagatacagcatttaaaattgctgtttagtgccctttcaatattattttcccaaccaaggcagactgctctggaggagataaaagacaatggatactgtactaagggctcaactctttggactacgtcagaagggggccactgaagttaaatgagactctggtagttattttgggttggtttcaattctgcattctacatgttttgtttttagagaaagtgtgacagatagagagagacctttgtgaatcccaatgttaaaacctgtcaccattttttaacaggaaaactggacaaacctaagaagttcaaggactggaaaaaatgtctttcttcacagtgagccccacacagtatttacgtgtttgctagatgggcagatgaccctctaacttgaccttcgagactgaagcgccagtgacaggtaagtggaaaaggggacaatgatatactttaaagagctggaagtaaagcccagtctatctccaccatggcagcgaataaaagctctggagaattcagttcggcccgaggccagtataggaaccatcaatgcgtgaaaaacaactaggacctcacggttcttgcagacctggttggctaagtgtgcacgtcaggaccgtaaatcatttgtagcacacgctatttacggatgctcatgcttctgaggtttcgccttacataaaccccgcttagctgcagaagccagtcggtatggggacttcagtgtggagttgaagacataccacactgcctctttaaatgtccttctagtttttctactggatgttctctagttcctctgagccacgtaaccctttacgatactaagacacgctccacatttttatttctttctgcgtgtgcagtgtggctggaagatcctaactcacactgatgctttctgagcccccagcgaagctgccagtgggcgcacttcctgccgggaggtgggcggggcgggccgcctcctccttcaagctccgccccaccctgcgtcccgccctccctcccggcgggcagaggctccgcgggggcggggctgagagccgtgggcggcgtggcgctgctagcagggcgcagggtcggaggtgctggggtttggcgcggcttagcccacggagctgtggtgtaacgctcgggaaagctcagcctcgcgggcaggagaagcatcgggcggaggctgccaccaccagctagtgcagggcctcgggccgagtggggcggagagctgcgggagtaagcggcggcccgggtcccgagcgctgcgcgccatggcgggcgggccccccaaggccctgccgtccacggggccccagtccttgcgcgacatgccgcacccgctagccggctccagcagcgaggaggccgtgggaggcgacagcacgcccagcccggacctactgatggcccgcagcttcggtgacaaggtggggcgcttggggctggggactcctggggcggagcgggaggaggatggatccaggaccacccctgacactgggccgcgctcatcctggcgcccctttcccggaggttaggcgtgctttggccccaacagcccttggccaaagcctgtcctctcactgcccccgcggggtcgcagctgcaggctaagcggccagagggcatgtgttttccctggctgagagtggccccgagcgcgggtgacagctggtggggaggggttcgggttgcagcaagcatgtggggacccggggcgtgtgctgcggtacttcgcctctgtgtcccgagaatgaggtccctcacccctctaggtgcattccttgaagaggagctgcagaataggaataacttgttggcgcctccagtttccccggactgcaaaaaaaaaaagcaagagttaatggctaatggttttccggggtgggtctgagcagccttgctcatcttctccccagtcggtcatgtggggagtgatctttgtttaggtttgctgtttgccccaggagtcacctgactccgacctcagcggcggctagaggagagtctctggttttctgtctagggcttcattcacctcttatagcgaaccacattgattaggtttggcagtggctggttttgtggttgacggaaagcaagctcgccctttgaccttctttgtgcagagggaggctcttggtcgttttgctatactctcctgctgctttgagagacagcaaagtcccgtggggaggaggaagagactgcatctcccccctccccgcccccatctccatttcagctgtgaccaggattttgagcagcgattgtatctgcgctcctgctgccacttagtcacgagttgcagacattccaattgttcttagcacttgagatcagggtctcttcctcctattaaaatagtaaatgaattcttcctttccgtagtattaatggaatgagtggaattgggagacttaactttacttcttctcttagatgggaaaggcatgtgggaggtaacatttcctatgggagagtgtgacttgctgggcctaagctctcagaatgaccgggaagtgatagggatttataaagcctaaactaatgaaatggatacattgaacagctcaaaatatgttcttgcgttcacactggtacctctgtggtcattgctttttatagattttaagattatgtgaaaacataggcagcttgcaaaccctcccttatgtttgacattcaaagagtgatcattgaatgcctgaatgataatttttttcttattattagcagagacattgattttgaatggatgtagaatgggaactaaggttaattctcagttctctgaaggaaattgaattatttccttactgctgtgtaagaaatcacttcagaatttagcacccgaaaatgctgtctgtgagtcaggaagctgggaggttctgagtaagacctacaggatgctgccatcatctgaaggctgggttgggagtactctaacgtcacttctaggctcactcccatggttcttcacaggccacagtagaaaagatgatccaagacagccccatgctccagccatccctataaatattgatcctcaaagtgacatacctctgctggattctgttgcttatagagggacactgacacagtgtgggaagagggtatgaatcctagagaataccaggaaatggagatcactgaggccatcttggagcctggcttctagtctaccgtgcgcgtgcgtgcgtgcgtgcgtgtgcgtgcatgtgtgtgcatatgtgtgtgtgtgtgtgtgtgtgtgttatgaattgaacccgtggcacgtgctctaccactgggctatatcccttgcttcacataaagctgttttgaatatttgaatatttccttgtggtccagtcttggatagttaattcagaagtgtggccagtttactagttagtagaaggtaaatgctctgtcccactaagatctggttggctggcagtaaggcccttgcctgattatgtatggtctccttcacaggatctattctttgagagtcttgaaggcactattattaattatttaacattaatttaatacatatcctaacaactgtggagagcatctaaatgacccaagcctccagggcccaatttacagtcagccacttttcctcagaggctaagacttctagtttctctccgattgcgagtagcattctcttattacatgtatcctcatacaatttttaaaacaagacttattttgtacgtgtatgtgtctgggtgtgtgcttctgtgtgaatggatacagggtgtgtgcaggtccttcagaggccagaagggggtgttggtttgcctggagttggagttacaagctccgtgggcctcctgagaaggaggctgaactcagttcctctggacgagtaggaagttcttaaactgctgagccatctctccaacccctcccaaatattaggaaagagatgccagccagctgcagaaatgaggacagtttggggggagctcccttgcccaccctcaccttgtttaggtatcataagtgcccgtggagggcaggaggtagcatcaggtgctgtgttcagtcttgtgagaagaggcctttttccctgcctctttagacattggggtttcatcccagacaaggatttagggttggctctgggggggtgaggggcatgaaggcgttggcaggctggagacagtgtcaggttattgcccagaagggagttgctttctctggcttcagatggcgttgctagctagcagtgtagctgacacttccgaatggccttttttgttctgggtgtaggaaagtgtggtgggtgctccatccacctccttctcacactgtccaaatcgcagtgcagtgggaagaattcttgtctactgagggctggatgggtgtgtccttctgatgctacccaaacccaccaggctatgtatcccttcattttccccctccagttaaaatgtaaataaaaccacttgacctatttctgggctgttttacctttgtccatgtcttctgagcagtgtctctgtgattcagcctcctgcctgcgtgttcattctgaaactgaatacttgactcctctcagcctccagtcctcagttaggacttctccacacacctccaccttcttcaccacctacttcctgaccttcctgccaccgaggtgttgctttcttttacatttcaatcattgagtttgggaaatccagatcttaccctgtcatctttgatagcttttctttaaacctttaactttctaaaaaattacatactgtatgtgcattggcgtttttcctgcatgtatgtctgtgtgaagatgtcagattccctggaactggagttgcaaacagttgtgagctgcccatgtgggtgctggggactgaacccaggtcctgtagaagagcagccagtgcttttaactgctgagccatctcttctagcctcctaaacctttaacttttaaacccagtgctatacagtgaattcaagactgaatagccaggagaccctgtcttaaaacaaaccaccaccaccaaaaccccaagtagtaataataataataataataataataattccatatttaaataaaacgtgctaatatagtggatcacagagccagttctcagccgtctgcgagtgcagtcttgacttcttcctgctcaagaccttgtactgtcctcatggcaggcagagtgaaggccagtgctccccagggtccttccaggcccacagaatcaggcgattcctgactcagcttgccttcttcaggcctctctccattgtgccctccacctgacattcatccacttgccacttccctcatttccttaagcctattcaagtctcaaattctcataaaggcctacccaagtccggttcccatcagccagtggtcccgaagtccccttcctgccctgctaccttccttctacaatacctgctgcagaaccttgaagattctgagaatggggattttgcagctttagtaaataatcttggttcctagaacagtgcttgactccccgaactcttttctggatgaacagaaagaatgaagcgtgcctccaaggggcagcgtggggccactcggatggctgagagcttgcctagcttgtcctaggctggagttcagaccccaccagagatgagcagggcatgatggcagtatacaactgtggcacccacactgtgctacactgggaggggaggcaggagcaggagtttaagatcatccttggtggagagttcaaggccagcaagggaatgaatggggtttggggatgagcagatggctctgctcagaaagtgcctgcagtgcaagcatggggacttgaactcgggtctcctgcatccatataaaggacagttgcacacatcagtgactctgggaacaggacaggatgatctttctgacacacagccagtctagctgaactggtgaactccaggttcagcaagagactgtctcaaaaaacaagttggagcttgctggatgtactggtgcacacctgtaatcccaatactctggaggccgagactggtggatctctgtgatctggaagctggaaaccatagtggtggggaccgtgactgaggacatccgctgttaacctctggcccccacactgcacacacagacatgtatgttcatcattcttttatttatttatttatttatttttggtttttttcgagacagggtttctctgtatagccctggctgtcctggagctcactctgtagaccaggctggccttgaactcagaaatccgcctgcctctgcctccggagtgctgggattaaaggtgtgcaccaccacgcccggcttatttttttattttgagacaggttcttgctatgtagatctgctgggctggtcttgaactccctgcctctgcctcctagtgttagggattaaaggtgtggatccccacgcctagctatgattgttaatcttttttccactgatgtatgtggacgcacttgtgtgcatgagatcaaagaacgactttttgagtcccttctcccttgcctctttgaggcagggtttcttgtttctgtggtgctacttaatccaggctggctgggctgtgagcttctgggccattctcctgtctccaccctcacctccaccccctatctggaggtgctgtgatgacaccaggtgagagacaccaggctttcttaagtgggctcctgaggatcgaattctggctatcggctggcagaatcagtgccaagtgctttttacctgctgagccattttgttagcccctagttaagattcttttaaaagagcataaaacaaaacaaaagagcaagctggccttaggaaagtgtacaagctttgctattgaagggacccagatacttttggctttaggcatggctaggataggtgctgatgatgttgggaatctgacacttgcaacaagggtccctctttctgatagtttcggcaaagctctgtcttggctggaattgggtcggatacccacacccatgcttgtgactgatcaggcagagctagctagaatccagctacctttggcttgagggactttacaaagtgaaatttctagatacaaattaagtatatctagaaatgtgcctgtggaatgtgaagagttagacattacttttgtcagtggagggatagatcaacgttcatgctcctaaccctacatgttaagacattggatattactaatattttagaagcacctccatgatcaggcaggcagaagatgacttccaaagtcaactgggatgggagaatagctcagtggagaccttaccgttgtgcatgagaccctgtgcgtgacttcccagtgacacacacacacacacacacacacacacacagagagagagagagagagagagagagagagagagaagaggaaacattaaagaagaatgtttctgttaccagagagaagagtgtattgggcaagaaggaagcaatgaatattcactggagatattccactactttgtcatttgatgtgtatatgtgtgtgtgtgtgtctgtctgtctaattgtgtctctgtgtggtcatccttggtcttcttcagtaacactccactttttttttttataaagatttaattattttatttatataagtacactgtagctgtcttcagacacaccagaagaggacatcagatcccattacagatggttgtgagccaccatgtggttgctgggaattgaactcaggacctctggaagagcagtcagtgctcttaaccactgagtcatctccagcccatacttcacctttttaaatttagttttgtttttgtcagatggtggtgacacacacctttaatcccaggatagccagggctacacagagaaaccttgacttgaaaaaccaaaagaaagagaaaagaagtaaaaaaacaaaaacaaaaacagacagggtcatactagtcaggtctggttgtcttataacttactatgtaaactagcctggcctccaactcacagagatccacctgcctctgcccctcaagtgcagggactaaaggcctgtgccattacccctggcctctccttgtttaataattaaattttattttatatgtatgcatattttgcctgtttgtatttctgttttacgtgtgtgcctggtacccaaggaagtcagcagagggtgttgtcacccctaggcctggatttacagatggttgtaagctgccatgtgggcgctggaaactgaaccctgggttctctggaagagcagccagtacttttaaccactgagctatctctcaggtctcttaacatttttaaaattattatttcatctcttattttcttattatttaccttatggtcctggacttagctagaatggctgtccagtgaggaccgtctgtcccctgggttacaattagatcactagttttgagataatgccagttcagtaatgtactaggcaaactcagaacaatcaagatggggtacatacacataataaaaaagtctgtcacagcaaagcagacttagattgatacagtattttggctgtagagaatggtgttgcagtgaacagagagttagtgagaacaggaatttttttttaacgtttcttctttcctccctccctccctccctccctccctccctcccttccttcttttttatttcttttttgggtgacaggtttttgctatgtaaccctggctgtcgtgggtagacaggctatgtagatgaggctggcctcaaacttagcgagatctacttgcttctgtctcccaagtactggtatgaaagtcttttgattccacatctgagtcaggtttttagtgatactgggatcagaggtgtgtgccactgtgccttgctttgttctaaaatcttacaaatcataatggctaacttttcagatttggggtcatttcccatcactttttagactttcatagtttcaggttagggacgttcaacctacagtgggctactgcaccttagagaatgctgagtgccccatttaaagtgagaccactggggtgagatgtctgtgtaattaatcccccgcatccctacagcaagctagggggcagagaagacaggagactcacctggaacctggagggtcagctagtcaggagtacagagtggcagaaacagtagagaccttaacacagtggaaggagagaaactgctcctgaacgttgtcctctgacctccacacatgtaccatggaatatacacgtgagcatcctcacacactgaaaatgataaagttaaatgtaagaacatctttataacaggaccaaaatttagttggagaaatggaggcatcttaccattaactttgtccaggccacagagttaagtaccagtcacatccactgtaactatctgttggtgtctcctcactggacagggaacactcaacaagcaaacctctgtttaccttcacttgtacccgaagcatccagcccagagcctggcacactgcttaagagataagagtgtgataagggctgcagtgacctctacagataggtcacatgctttctgggctctgtcagtcctcaaaccgaactgctgaggcgttctcctgaatagccctggctcctgactctgccctctgtacacacaggagaacacacgcacacacgcatgcacgcacaaatgacactgggtttcattggctgctctggtggtcaaatgaaggactcagaggctgtggttagcaagcttcagtgctcatagatcgccagtgttccttggccaagctgatgtctctgtactcattttgctttgagaagctcttgtctatcatggaacatctgacttccctgcagctctcaattcccaggccactttggtgtcctgtcttccctttactgccaacaaacaccctctgtgtctaagctctgatttctttttttcttgctgtgcatccctagctggtttgctacttgctgtgtagcccaagctagcctacaactccctgagacacgttgcctaagttctaagctcagcttctccatcctgcagtgcccttcattcatccggaactcatcctgttcagatcggctgtgattgctcatttgaatgaagtttcccagggcagtgttcatctgagcaggtttcctttcagtggcgagctttggacaaactctgccctgagataactcattaccgccccattttagtcttctaagcacatcaccagcacccttgctacttagctgagtcctcctcctccgggatggacagatcattctcagtcccttggacgaggatgccagtccctacttcaccaactagagtcagctgaatccttgccaatccttcctccccaggaaacaagaaggaaagagagaacagctaacacgcatatcagtgcactgagagggcctcaggcccttcccacccatgtcctctctgaccatcctccaccttaagatgctcaaaatccgtgtgcgtgcttcagactcttagtcatttactgctagcactgacagttctccccacctcccacctttggagctttgcccaagccacttaggaagtggagctgtcttcacacccccacttgactcccaaaagcctccttaagcctcaaggaccagatgagcacatagtgcctgctacctaagcccacttgtagccaagcacaaatacctgaataatgggactcacacactagctttggacactcccaagatttttactacacacacacacacacacacacacacacacctattagccctggctgccttggagctcactctgtagactaggctggcttcagagatctttctgtctctgcctctctagtgctgggattaaaggcgtgtgccaacacagcccagattcacttcctattttaagctgattttttttttcttatgtaaagcagtatcaacagaaggaaactggctcccaggaccaggaagtcatgctaggtgctaaacaagctggctccagaattcaaacggtcttgccttctctttctcttctagtttacttacctctgacttttattttattttgagttgggtctcactatgtagctttatttgtcctgggacttgctttgtagattatactggtattgaactcacagagatctcccatgcctctgcctcccaaatgttggggttaaaggcctacgccaccatgcctggctctgacttcattcttaagtaggcaatagaatccaatccaatagaaagatatttccatcagtatctaataaatcttgggaaagactaggggttcccccatgtcacctgcccactaaggactgtattttggtattagaagaccttggtgaaaggccagaatacaggattaagccagaggtcaggtcgctcccccgccccccccccccctttccgagaagctggtcaggctgcttcctatcctgagaggaacagccctgttgctcagctagagtccacagaagtgactggattctactaaggttaaggtcaacttcttcactgaccctccagtcctgaggacgatgggagcttctgttactgctgctcttggtgacatcatcatgcccctcttggctcctcaggtttctcatcacctaggcaactaattccctgtacttcaagtccctgagattgaagtaccttctgtgtttttttgttttctaattggaccacgacagatgaatatacaaaaatggagaaagaaaacgtggaggaacatatcaaggaataagaaaagctaccttaccatccttgatctcacattaaccctgggctggaagtctctctatgaccccttttacaggcgaggatgcatcaaagccatattagtggagctgagattcaaagcaagcacctggcctcagagcacactaacgcagggagctgagcaagggcttagagctcaagggttctcaggagggtgggtgggacctgctagaggccagacgagataaggactgggaagcgtttgcgggatttagcaataaggaggtcaaggaggaccctgaacagcaaagccagaaaacaggtaacaggaggctggggagtaagccagaggttacaagtactgaggacggcggcatgacttccttataagtttcttttcgaagcacaataacaaaaagtacatacatatattcgtgtatgcactaagtatgagatggagagaaagaccaccacggaaatattttcttcactcttaagtttgaggatgttcagatgtagatggaaatgaggcagttgggagtgtctgctgccagctttgtttactatggcaaagttccccagagacaacgtgttttatcagaaaagatttaagctaagagtatagccgagtggtagattgcatacatggatatacaaagctctgggggaatcaatgccacacacacacacacacacacacacgcacgcacgcacgcacgcacgcacgcaaggtttaagggtacaacacccacctctatcagcttactgtggaggacccaggaaacacagcctgtcctttctaaagggaggagacttcggcagtcactcagctcttacatgtcaccatcctgcagtactaccagtctggatgtcaagttctcagcacttgaactttggaggttgtggagacacagatcatattcatactgtaggagagaaagactcaggtgaggaagagagtgtctccaaaagtggactatacccaggattggccatatcaactcctactaaaacaggaaaggaaggagggctacacattccgactgtgtaacttagagaggtctatcctatggctctcaggtgtggttgaggtcatcagtagagggggaaggtaggggaagggcaagaacgtgaggggcaggcagaagccttcggtcagctgcaggggcgtgcgagggctactgtggaaacagacacccagcacctgtgagctacgcctgtgatgatgctccagctgcctctgttctctaagactttggggaaaggtgtgaacaaagaaccaaggtaacagtgaaacagggcagctgctgagctgggcctcattacataaagcagatggggctgaggctgtcgttcagtgtagaacgcttgtctaacatgcaggaagccatgggttcaagcccccagcaccccataaaccatgtgtggtgacatacccctgtaatccaagcactctggaggtagagtcaggcagattagaagttaaaggcagcctcagatatatagtttgaggccagcctgggttacatgataccttgtcacagataagcaataatacataaatagaggcgggtagagatgttggagctgcagctcagggcccagcagctcatggtaggccctaggttttctccctggtaccacaaagggggacacaaatgaaaggaggggagggacatgaggttgagaagcagcatccgtcactgctaactcagatggaaggcaggagagtagggcagaccacgtggtgggtgtctgtggagtcagtggaggtcagcaaagccaccacaggacacaggaaggtggtgacacctatgagacaccatgtgtttctgctgggcctgccctcctcgatgaggcctgggtcacaaagcccaattttctcttttctgtctcctttcagacgctggccagaagctaagtatgcttttgcgataccttgggcgtcttagtttccctcgggcaccctccccaccgtgtgtcagacctccaggctgagtaaatggagtggcttttttctttttttttttttcctctgctcctttctcctcctcctctcaacagctccgctgagtctcacagcttgtctgttcgggaggtttttcttttaaaattgtaatacaattgtgtggagcttaaaaaaaaaaaaggaaacgaagcaaatagtatggagatttctaaagaattaaaagatggagttagctggtgactcagagagccctcctcttccgacacattccatgcaaagcaaaggcaaccacctcctcctagaatgcctggactccggctacagagatggctcagcagttaggagtttgctgctcttgcagaagacccagggttggttccgagcacccacacggcggctcacaactgtctgtaatttcagttccaggaatctgacaccctcttttggccttcaagtgcacagtttgcacttgaggcatgttcgttcgtgcagagaaacacttggagactgagttagtctcagtctggtctacatagtgaattccaggccagccggggctataaagtgaaacctgtctaaaaatcaagaacatttcagaagtgaaacaggtactgctcaactctacagggagagtgtgtgactgagcagtctttctgagcatagctggacctttgtctcatactggcggcctctacaagggaaggggtgaagctatcattagccactggctgaaggctgtttgggtggtgagtttaggcattaattaacagtatttttcaaactgcctagaggggagacagagcaggttgagctggggaaacagccaggctgagaaacgcaggtgctgggttggtagttagaccagagggtgccaaagtggtcagcacgtgggtgtgctgtcgggtactggcagcacctgctatccttaccgtgaagtttatgcacagggagtaactaagaggatgtgcctctgccaaaggagcgagtttttgactcaggatgaagtaggtgatttcctaacggacagaaataagaaactcagccccccacccccacccccagagcccaaaatgtaaatgtgcaggcactaagtgtcaattggtgaagtgccatggagaggccagtgggtgatgcggcagaccattggaggaagctgttgggaggccagccaagtgctaaggaacaggaggagcggggctggtttgtggtttttaagtcctgttgatcaagcccctagagctgggagcagatggttggtgatggaggtgggggtgagtgtgtgtgtgtgtggtgcagttccacggggctcctctcactggactctgagtgtgccttttatttgctaataataggagtacagctcctgttaagtcaagcagaaggggagggggtgggtgagcctcttgacagtcacagctggaacctctgaatgccactgacgacgggtctcaccatctcagacgtgggaacgtggcagcctttgcaccccacacgttttacagccagagtgaatggggacctgccaacgctgcctggcttgggtcatgtgcggcaagtgggccctgagagtgagagggacactgattggcttaacttgggtcaatcgtctgcggctgcggaggagtttaatagctgggtctagaagttggatggattgtaaaggatcacagtgagggcatctgccagcagcgtgggtgactagtgggatgctgatggcagaatttgatgagacatataggtcagaaataaaagtataggctttctaaggcacatgatttttaaggaactatatattctcatgctatagaattcagctctgtgtgtgtgtgtgtgtgtgtgtgtatgtatgtgtgtgtctatgtatgtatgtatgtattgagacaggatctcactatgtagaccaggttatcctcaaattcccgtgagtactgaaattaaaggcttacaccatcatgcccaacatttttaaaaaagatttacttatatttaaatgtatatgattgtgtctgtgttggggtatgagcacgttcatgcatgtgcccatgaagaccagaagagggcactgagtgccctggagctggagttaccgtggttgtgagacatcaacagtgctgaacccaggtcttctgaaagacctggatgtgctcttagccgcagagccgtctctccaggtctatgatttacttgtttttaggtagagttttgcatgttgcccaggcttttcttgaatttttaggcccaagtgatcctgttgcttcagctcttctggtatttggcactatggacacatggcccaatgcctggccacaaaaataaactttttgaaagtataccatagtagttttcagtataattttgaggttgtacctgattccagaacaatttcatgtccccagaagacctctgtgccatgtgcaggcattcttgagtctcttgttcccagccactggcagctacagattcctgagtgtgtagacttgttgcacaggtgtttcacgtctgtagcatcatagggtgtatgtgcccttgggtccagcatctgtcacttactcttgatgttttaaagggtcatcatgtggagtatatgagcatttccacttgtttgtcccccaagctttactgcagtctgactgccaaatcacggtatatattgaagacaggcaacacaatgttttgacattcatgcattgtgaaaccatcacatcaagctacttaaaacataaaacatcgagctgagcagtagtggcgcaagcctttactttcagctcttgggaggtagaggcaggcggatttctttctttctttctttctttctttctttttttttaaagattatttatttattgtcatatgtaagtacactgtagctgtcttcagacactccagaagagggcgtcagatctcattacagatggttgtaagccaccatgtggttgctgggatttgaactcaggaccttcggaagagcagtcagtgctattaactgctgagccatctctccagcccggatttctgaattcgaggccagcctggtctacagagtgagttccaggacagcaagggctaaacagagaagccctgtcctgaaaaaccaagccaagccaaaccaaaccaaacaaaaagcccataaaacatctatcacttcatatgtagttaccttttcttgttttggtaatgagcagggacatttgagtattcagcaaatttcaaatataaaatacatgattatgtgccatagtgaccatgcggcatagtaggtctctctgagttaatcattttgtaacaggcagtttttgtcttttgactagtacttcctctttcccctcatctctagccctggcatcactgtccctttatgagtgatgctcatcttaaaaatataccctgtttctttatcctttcctcagttgatggacactaggttgtattaggcctgtgtcccccctttgcctccaaaaggataatgaaagtaacctatgtaattttctataatagttttgatatgtgaggtcaatggtcatttgtaaacttatcttttattcacctgatgacatctctgaggcttacttcttctgcctgctaacctaggcctaattctggaatcttctagctgccatatagtctcatctaggcctagaatgcttccagcctctgggacgtgctgctgagtaagctcgccctttctagctctttctgaactctgaatggatgatcaactcaactatcctggctcaaactcgtctcctagctgactgattcaatctggcttctctctcagcctctgaccgaattgcccagcttaacctcaaactctctttggcaatttgccctagtcttctggcttcttcctcattctctggctcattctgtcttcacctgtgtctggcttgtttcctctttagcctatcactgcctcctctttctagttcctgcactgctctcttatgtccctttccttccctttctcatgagagttgggcagatcttattctgtcaaacctttctctgattcgtcaccttgtccgccactcaactagacatcactttcaaaaatgagtgcttccttctacaaactaactaaccttcattgtttgggattaaaggtgtgtgctaagggatgagccacacaataagtagaaaacgttttttttcttcagtaaatcacaatctcagcctctcagtgtgatcaagtgttctgcaacagtcattctagctaattaattccttttcagaactatccagggcattgagcacatgacctcaccttgctaggtatatataacctttgagctatatctccaaccttctttttacttcttttttttttttccttttaaatttcaaaaccaactctgactaagttatttagaactcaaagtgtagcccaggctggccctgaacttggcagtccttctgcctcaacctctgcagtagctgggattacagcattgcacccccaggcctacccagttacttcacttccagcgtgatttctagggccttccatgcctttcttctccccatctccaaacagttttcacacatacaatacatccccattgttgttcggatcttcagaacattgtttgataaagagagactgtacttactaagtggcagctgtcaccttccctggcttgtcccctgaggacccctattttccttgtttttgtgaggtttcgttaaatagcatcttggaggatgtgaccagacagtagttgtctctttgtggcttattttacttagcagcatgccttcaaggatcgtccatgttgtaacatagacaggacttccttcttgttaaggccgagtagtattccattggacctagccactgtatctttcattatccatttattaaggaacaatgggttgtttttgcctcttggctattttgaaaatgctacattgagttgagctgggctggagagatggctcagtggtcaccagcacccacatgcattacagtgggtgtaattacatgattccaggctcacaactgtctggaagtccagtcctgggggctctgacctcggcagggactgcacacatgtggaagatccttacattctagaaatgccattcgtttagtcaggtcaggtccagacattccagcaaacagatcttcctgtagtcatagcaggaagagttgcagagtgactggtagattacagaaggggaggccaagacatccctggggcagctgagtgagggcggggtatgctaaggagaggcctgtgctgctgccgtcagcatccatgctggaaacactgcagccgagtttctgcaccatctgcccaggcagaccacgtgcactctgtgactttcatcagcagttgtacagggcaggccagcttcttgttagttcctcacagatttgtacaggacttccacgtgctgagggatacggaggtgcagcctcacagaacagccattcagacagaggaaggacaggtgaaaactgtccagttagctgatgtcgtagatatatacacggtgtgttggagcgacagactgttttttttttctctctctctttccttctttctctctctctttcttttttaagttaaagaactttaaaatttgactgaggtctttggtggcccatttcaggtagcaactacattttatatttaatgagaatttgaatggttgcttttctgctttgacaataatgagagctcccctacttttttgttttagcccttagatactcatattccccccgcctctctcccttcctccctccctcctccctccttctcctcctccactcatggtcgtgtatgaaggttagaggagagtctcacatgttgctctcaggagctccactagactggccggctggctggtgcacccagggatctcccctccctcactgcatcactgggatcacaagcttgtggtcctaagcccagctctttgacatgggtactgaggagcagactcaggtctgtatgctagcatggcagacactttactgactgagcccctccctggtctttatattgttctaacccactcgagttcattatcaccagtgcatccccatttgacaatgtagtttgtaaggcccagtgtacaattcaatgcatgccttcttttttgaaaatattaagcatggaggttagagagatgactcagttgttaagactcctggctgctcttctagagaacctgggttcaattctcagcacccacatggtggctcacaagtttctgtaattccaggttcagggcatctggtgtcttcttatggtttatgctgatacctggcatgcacatgatacacatacatatgtgcatgaggcaaaataccatgcacatacaattttaaatattagatgtgttggggtagtgacaacagagcatcaggctcagcattggactacttctaaacacagggttctgtgcaggtatgttgatggcatgtccatgaagcaggcccacatgtccttgagggccctgggttccaggtccagttacaaccattattaattggctgactggtggaccccagggaccttcacccttcactttatcactacgattacaagcttgtggccccacacccagctttttgtttctttaattccggaagcgtaggtggtatgctccagatctgtcctgcttccgtcctgtgtgtaagagacacctgggcttgccaggcagccgtggttgacagtgagggtcacaagattccttctgaagcattctctgtttgtagaagaacttaatgcaatctccctgaggcccagccttccttgagtagtgtgtgcctggtggtccttcatttccccagcctggctgcttctctttccttctgtttttgtctcttctgcaccaagtacatccagtctgtgatgtctcctttccccactgtctctcagaggtcacagtgatgtgtgtccctggaaccattgttaacactatggaacccaagttttggagggtgctctctggtgttatttcagtgaactaccccctgacatggctaccttgctattcctctctgacaacagaaagttatcattgagaggtgaagtaacatgttcaaggttacagagctgaaagagagtgaggctgggatttgaacttaggtctgttcaactcagggaccttcactaatactatatatacagcatgaccctgaattgaccgtgatgcatttcttatgtagagcatggtctttgggtaactctgcctgcatcttactctgcatcaaattcctcctcagtttctggcttttccttttttggctttaaactcacagtgtacctctctgccttgtttctaaagccgccttttgctcccatcaccatgggcgccttggttgagtggtcttggtgtactacgtccatctgcctcaccatctgtttcctcctaattcagtgtcacacccacaccagccaaggcctgccccaccagtctggctcagcagatctgtagttgtttctccactgttgaatcccaggccaccaaagctgaggagctgtggacatcgttcccactttccccaagggcttagtttttagcggagggaactgtgacctgccaaatcggagttaccatttactaccattttctccatctagtgtttaatacttgctgagtgaatggactctttccatgtttggcctgtttccttctaggctctgaggccatcctgagctctggttcctcagtttatccatttctcctgatgtctctgtctgggcttccgtgtgcagaactgcacaggagtctcacagctgcatctctggctcagtggtccagactttgaatgattcccacgtttcatcctgcagttccttatggaagaggatttcaaaccacacttctctcccctccccaacagtctcattcctatatactgttccttcatgtctgctttcatttttgttgtgactgtcaacatccacattaagatgggactgtctgtttattcagacaggcccctcatattctgagcactagtcaaattccacattcctcaaggaaggccttgcatatccattcccacctgtgtggacattgtccattcagtagtgatccgttacccgggctgactttctctggccagggatctgtttgtctctcttgttccttcctagcaaattatgctgttgccaactgattttcctcctgagctggctggcatggtatgtggattctcgtttccaagactatgataggggagtaaaattacaggcgaatgtggcctcggccatcactgtgctgtagggtcttcagattgctcttgattgcaagaatgagtggatactgtgtgaggggctttgccttaagaccccagtactccaagtggcctgtaaagcaggagcatggacactccctgggcgactgttggaaatggaaatccccaaacctcaggctgaactccagagctgcggaaccagtatttgacttagttttcttagtttgggttttgttttcatgaagagacaccatgaccacagcaactcttatccaactggggctgtttacagtttcaaaggtttagtccattatcatcatggccggaagcatggcagcgtccaggccaacatggtgctggagacaatccaagagatctacatttatttatttatttatttatttatttattttattatgtgagtacactgtcactctcttcagacacaccagaagagagcatcagatcccattacagatagctgtgagccaccatgtggttgctgggaattgaactcaggacttctggaagggctcctaacactgagccatctctccagtctggagatctacatcttgatccaaaagcagcagaaggagactgccacactcgccagagcttgagcatgtatgacctcaaagcccacctccacaatgacagacacacttcctcaaacaaggccacatctactccaacaaggccacgtctccctgtagctccacccgtatggccaagcattcagaatcatgagtctacaggggccattcctctcaaaccaccacagcatcctgcatttgactggaccctaagtgagttgtatgcatatcaaaatgtggataggatgctgggtatggtggaacacgtctgtgatcctttggaaggcagaggtcagaggatcaggagcttgaggctagcctaggctgtatagccagatgtggcttcagaataaatataaacatttaaaatactgctgcctctgcttcctcctcctcctcttcttttctctttttnnnnnnnnnnnnnnnnnnnnnnnnnnnnnnnnnnnnnnnnnnnnnctccctccctccctccctccctccctcctcgtctctcctctccaatgagcacactgttttagaacctttagagatttctttgggcactcagaccctctgaggagctcttaggtagtagtgctgcctgaatcttgagaagtttggatcccatggtggtacaaacctgtaatccctggggaggctgaagcagaaggaccatgagtttgaagccagcctggtgacacagaggccctaagactcggaatcaggatgtcactcagtgtagaagtgcatgcttagcatgtatgagggcttagcatgtatgagggcttagcatgtatgagggcttgtagcatgtatgagggcttgtgttcaatccccagcactgaaaaatgaaaagaaattagatttagacctttgattttttttctagtttttttccaagatatgtgtgtttatgtgtgtgtgtgtacatatgtgtgtgtacatgtgtgtgtgcatgtgtaatggtatgggcccacatgctgtggtgcctgagacagcttgtaggacttggttttcttcttccaccatgtggaacctggggattgaactcaggtactcaggcttggtgcctggcgcctttacctgctgagtcatctcacaggcccttaaagtcgcttaagaaaattttatggccatccaaatttgagattgcctgccttagaattctcccactcacccagagagggagagctcgtgatcaagttgatgctgtcagcttccctgttcaccctaacttaacccttacagaatttcataaatgactgatggggtacacatctgtggaggcaacctcacaacgtctatctatcaaaatcacaaacaatcaaattccttttctctctcctctacctgtgagttcgcacagaaggaaaaagctgtcctttcccccgcctgttagcatccctcgaccttgagtcaggtctgtcttctcatccttcttccgcccagtgccttgggctgctggctggcattgggttctcctccactattgcctttgacatgccagtggtgttactggttgctccactcccaaagagcctaatgccagggtccttgccactgcatcctccaggctcagacaggacttgctgatccgtccctgggcttctggagtgccagttctcctggtccctgctgtagcttgctgcctgcctgttctcagcttcctttgctgggccctccttgcttccctctgaaccctgagatgctctgggattcagtcctgacacctcttgtctgcatagtgcccttaaatgtttaggatctagctttatggctataaacatcacctgtgcacgggggagtacaatcccaaacccctcctgagttctggatccttctctctcactgacgtctgacacacagacatgcatctcccagcgggcttaactgcccacttagcttggcagtggggaaatgaattcctccagtctttcttgtattattctggtttcttaggccaacaaaaatctgaaaatgtttggaatattttaggattatccttagctcttctctctttctcatcctggcctcagcccaaaacccaatcatttggagatatatccagaaaattagcactgcttactatctacactgcagctgccccagtgcacgaagcttcatcttttgcctgatttaccaggattgtctcaggagcctcttggctagccagcttgcttcgccttctgcaccatcagtcagttgacaacagtggtcagagtatgctttcagccagcagccttgtaaacatttggagacattttagcaaccccagccctcctccatccttctcagcctccaaggtgccctgactgctttctcagcttctgcacacttactgccttgcctcaggccttttgcacagtgtgttcccttggcagagcatcctatcccagatagcactggggctcacagtttacaacctgcggcacgtcgtttaccttattcacagcttctctttctgatgtttccattacccatggttattcgtagcccaaaaatcttatatggaaagctccagaaatatacaatttcaaagtttttaagttgcactcccaacagaaacatgttaaaatccagcacttttctgcaggatcccacccagatcagggaaatctctggctcaggatgtctgtgctgggcaaactgtctttccattgctacttagtaaccctctaagttatcagttcagcccttgtttgacttaagatggccccaaactagttagtttttctttatggaaggtcaggagtttatttttgctcacagttctagagggtaagacctgatgagagcagagtggaggtagggaacaagtggttgtcacggcagcgggagcaggaggtggagtctctctggaagagagagcagcaaatggacctttaaactctgagagctgcctccagaaatacttccttccacagaactagacctcctaaacctcccagccagcactactgactggggaccaagtgttcaaacactggagccattctttttccaacagcagtggtgatgctggcagtcatattagaatatattgttgtcattgcttcacttttaatagtgattgttgtgtatgtttaggggaaatcatttgtaggtctcagggctcgcctccgtttcagcacctgccgtgggttcccttagagtgtggacctcatgggaagtgtgactgctgcggcacaccagggcccgttttgctccattttctccctttctagcctactttattttgcttaacagctcttttgccagcagatgttttgcctaacacctgtctctccattgctataaaccaaaccacttgaagactagagctttattgggtcagtttattgatgtaatttcaaggcatgaacaaaacctaggatggtataggtatacacattgttgacccagcaaatgaacatgtgctaagtgatgtccctataaagatatttgtctcagtgttatgtttaatagcaaatcaaagggcctacatagcaatcacttgtcagctgcttttgtatcccaggctggcctgaaacttggtccaggatggtcttgggttcacagctgtcctcttgcctcagcctctcaagtgagaggaccgcagacataaaatacctgggagaatggaatggataaacaagtcgaactttattcaaagctgagcctcaaacaatttatactgagggttcagaaaggtcacttgggtaaagttgtcataagttcaagctgtatacaatcactacacgtgtcaaagacatgttttactgcagaggcatatagaggatagtttaaccatttaattgaataacaacagcaggcaataatgagtaacgggaagtaaactcgctcctatcccatacaccctagaggagtacaaagactcattccaagaacaattctgttttgaagaactgaggtcacaagatgcttggagtgttcatactcagaattcccctcttatgactcccttcctgaaccatgttccagcactcaggagcaaagtgcttgctattcagtcttgaggacgtgagtttggttccccagcacccgtggtagcacattcctttaaccccagtactatgagggtggagacaggaggatccagggactcacctgtcagccaggctagccaaatggcaggccctaccttcagccagacatcctgtctcaacaacaaggtggagagttgagtttctcagcattcttgctgcccccagagtctatccaggtgtgctgggaggcctggcctgtgatgttgggtgttgttgaagaagggttttgtacaattcagagcttatctttgtagtattccagactagagagcagtttatttgttggctgaaagaggtccaggcgtggggttgtggcactaacatgcatctctggctaagcacatctcagttggtgatttggaccaaaaggtcgatctccaccgcagccacagctgtactgtagcttttctccagtcattctgattctcctaggccctctctgttaaagcctaagcaaaacgttaaggccttgatggaatgttaaggcctaggtaactgttacctggttagcctgccattttatgctgttactaatattataaggaaactttctaatatgttgtttctgctgttactagggaactttcttgtacccgagttgattacatattatgttaagttctgtgcttttgaaaaccaatcacggtagaagtcagtagaactgttttgtctagttacccaccataagcttggacctggaccaaccacccagctgcacttcctgcatctgtgtataagcttctatggtatttgcttttataaactgccgctgagatggactccaacataagagagacacctgcaccaatataagaaattctttggaataggactaccattttgagtagtggttgagtaaagtttaagttcccaagacctccctaggaactgacatcctacttggcggaaggagacacgtatgtatgtacgtaggtgactgacattcttgttggcatgttaagacttgaatgttagataacacaggtctcatcctggttgatgagttaaagcatgaatattaggcaaagcaaggcctctgccgcagctgaacaccccaactaatgggagcaggatacaagtacaacaaagccatgttcctaaggaaacccccatccctaaatcctgattggtggaataacttggcatagatgtttgtagatctcaggtttaaaaaacctagcaggaccttaatacagtgtcatggttcagttcctgagtctggaccatggccctgattgatcaatcttggagcatatatatgctcaataaactatccctgtgtgactgagatcagtgttcgtgtggttcatatgcaattcctggaccccagccctctctacagagtgagaattcagactcaggattttcctcacagtgcactgcagtgtcccaggaggagtttcatctcacctaagccaagtacgtatagatggctgtgtttcacttctcctgcttgcttcttaatgcacagcacacagaggcacagcattttgtttccatgtttctttgtgtttaaattatgaggctggctagagaagtcttgctatggacttactagtgaatcagacaagtctcgttccctgtggggttaaggtgctacggtaagtgagggaagagaatctgtccagtgactgacagtgcagccaggagccgaggggatgctatgcctgggccgtctgtgttcctctcaaagcaggaagtgctcctgtgatgttgttgccttggagagattgcttaaaggctataaatgctggcagggcaagctgctgcaggacggagcctttgaggttgccaagagaatcttgataaaatcacgtactggctgtccaatcaataagaggggatattaataataatacttactcaattaggttgttcagatagcctaatgagattcttaaagttcacatgctggttctgtaagtgatttctggtaactttcttgaacttacttgattttttttttcttcatgtttgtttttgtggtgtgtgtgtgtgtgtgtgtgtgtgtgtgtgtgtaggtggatgtcagaagacaggttgtgggaattgattctcttctactatgtggatcccaggttgccagatgtggcagcaagtgccatttacccacagatctatcttgtaggctcatgatgaacatatttttaatggctaagaagacttttttttcctttttgtttttaatacaatgtctcagtctatggctagcatgagctatggttcagcctttcaagtgctagatttagaattacgaaccaccacatcagctctttgcttgcttttgatagtagagaggtgcattttagtgcagaacgggctaccttagtcacccagacatgagcgaagaagaaaataaagaatggggctgagcaacacagccgcctttgctaagagtgctgccatgctaggtaattctgaggaccatactgcgctctctagagctttgtctcagctggcagaggttgaggagaagatagaccagttacatcaagaacaagcttttgctgacttttacatgttctcagaacttcttactgactacattcgtctcattgctgcagtgaaaggtgtgtttgaccatcggatgaagtgctggcagaaatgggaagatgctcaaattaccttgctcaaaaaacgtgaaactgaggcaaaaatgatggttgctaacaaaccagataaaattcaacaagctaaaaacgagataagagagtgggaggcgaaagtacaacaaggagagagagattttgagcagatctctaaaacaattcgaaaagaagtgggaagatttgagaaagaacgagtgaaagattttaaagctgatatcatcaagtacttggaatcattagtacaaacacagcaacagctgataaagtactgggaggcattcctacctgaagccaaagccattgcctagccttacccctgtgaaggagacattggattccccagtgagatcatctagaaaccatctaaataaaccactctatattttatgaaaaaaaaaaaaaaaaaaggaatggggctgaggagacacctcagcagttaagagcactggctactcttcagaggactggggcttgattcccagcacccacatgacatctcacaaccatctgtaactccagtttcaggggatccaatgccctcttctggcctcctcgagttccaggcacacaggtagtacgcaggtatacatacaggcaaaacatgggtacacataaaaatgactagaattttaaaaactgaaaggaagactgctttctgtctcaacagggctgtgtagcaagtgcatgaggggaggagggcaagtgagatacctctgttttctaaggtcctccacgaccgtagttagacagaaagctggcagtacagtgtgttaacagtccaggcactggactctggcctagatggatggggcagtgacagaccctatgttaaaaagaaggtggacagcatcccagagaaaggaacacctgagtttgctttctagcctcccatgctggtatacgtgtgtatgagtatacccttcaacacggtcacggacccacatccatattctgcaccctaccatacacacacacacacacacacacacaccccacaccacagagcaagagaaaatgaatccagttctggagagtctatcaggggaagaaaatcctgactttgaggccaaattatagatcgtcgtgaagctaatcaccccccagtgctgcttggctgtacgttgtttacagggccatcgatccggtcacggccctcttctcaacatggcacatgttttcgtctcctctcctttatttcagtttttatcctgtttcaacaagactgaattccccttgactcactgaacacgtatatctcgaaagcgaaggaagagccttttgatatgtgtgctgcacaccttgaagaagggcttatgtcagctggcaagaaaacggtcttccctcctcaaggaaacagacgcgagaaaccagacttcggcagggggttcagattccattcgtttactcattacatatttatcaagttggatattgtctctgtgctcacagccaaatccccattgacaagcctccgtgcaggactttccaggttcccttttgtttcttctgccccaatattaaaagatgaaggtttcaaactaaaaattgtattgctcctgtctgatacttttattgtcaatatgcagagctactttaaaatttttatcttgcatctagtgacgtactcaattcctaccaatgttggataacttgtataagtttcttctccattgctgtgaacctgccattcagggcagcttacagagggaggcgtttatttgggcttcaggctgcagagggataagtccattgctgtcgtggtggggcagggaagcatggcagcaggcaagggcaacagtggcagctgggacagcaggctgagcgctccaatcttaaactacaagccaggagtacacgggaaatgggtcccccaggcatgcgatgcttcctccagcaaggccacactgccaagccaaacaccaccaccaactcaggaccaagtactcagacttaggggacatttatcatcctagcctctatacttgccacttagaaaattcaagtagtcacgttttgaaacgtactgatttcttaaaaaaaaaaaaaaaaaaaaagacactgtttgggtatcctggtgcatgtctttaattccatcacctgggacgctgaggcaggtggatctctgtgagtttgaggctagcctggtctacatatagcaaattccagtccagccagggctgcatggtagctctgctgtattagaggatgacagttaggattccagcacctgtatcaggcagctcaaaacacacacccccgcacacgcacacgcgtgcacgcacacacacacacacacacacacacaccattttattgcattggcctggacatatgaagttcttagatgaggtcattcttgtcatgtccttgacgggggcactgggtgtttcttcattagctttatttgctactgagttggtttctcattgagttgagaagttttctacttgtatttctttctttctttattttattttatttttttttctttttcgagacagggtttctctgtgtagccctggctgtcctggagctcactttgtagaccaggctggcttcaaactcagaaatccgcctgcctctgcctcccgagtgctgggattaaaggcgtgcgccaccacacccggctctacttgtatttcttaattgccaaattatcttaggtgtatgggtgttttgcctgtttgtctgtctgtgcaccaagtgtgttactgatgccagtagagggcagaagagggtgttggctcccctgttattggagttacagactgttgtgagctgccatgtgggtgctgggaattgaactctgatcctcttggaagggcagcaagtgttcttatccactgagccatgtctccagccacccctaatttaagaaatactaggaaatgaatgtactggttatgataaaatgcaccatttagcatctctggatgttattatatttttctgcattaattaattgattatttcccccctttttctgttttgagacagggttttattattaccctggctggcctagctagaattctctatgtagacctgggtggccttaaacttatagaaagccacctgtctttgccttctgagtgctgggattaaaggcatgcatcaccatactcagctgttagttgatttcttgatattgaactatgcttatattcatacttagaatgcattctcttttgctatggatttagtttgctaatggtttaaatttttttatttttaataagtttgtgtatgtggtgtgtgtgtgtatgtgtgtgtgtgtgagagagagagagacagacagacatgacagacagacaaacagacagacagatagactgtgtgtactaagaattgtgcccagggccttgtgcttgctcagtgcatgctctaccaccaaggcacaaccaatattttccctttcctccctccctccctccctcnnnnnnnnnnnnnnnnnnnntccctccctccctccctccctccctctctcctttctttcttctctccaccccctaatgtttcctacgctgtcctggaactcaaattcacaattctcctgcctccgtgtctccactgctggaattagaggcactcactgccatacctaactctctgcagttctggagatctcgggcctcctgcacactaggcaagggctgtcctctgacctagacccccaaccctctgtttcgagtaaggctttattctgacttattttctttaatgtgatgtgttaggtccataagagccgtcttctccatggtattgtggagcatctgggtgtggcgtgtggcatttactgggcactaaggctagagttggcatttgcccaggctgctgggactggaaaaggtgtaagataaggctggagagggagaacgctggagactggcctcttggacttggtctttgcagcttcctgttgtgctccgtggctggctagggcctcctcagctgaggaagtgtaaactgagttgccctgcactggagagtttaacagctattctagaaatcccttcctctttgttttctccaagaaaccagccactccgcatccaccacccttccctttccggcctctgctctcagccactgtggccctccctgtatttgctattttccccaggtgctttaaataaaaagaaaatcctatctcatctcatagccagcatttcccatgtggtcaatataggttctttctttggacaaggtcttaccatgtagctcttgctggctttgaatttgctaggtagaccagattggccttgaattcacagagatctgcctgcctgcctctgcctccccaatgctgggattaaaggtgttctctgtcatgcccagccccattttggttttggtattgctatttatgtttgaatgtgtgtgagtgcgtgcacactcgagtgtgattggatatgagcttgctatggcatttgtgtggagatcagaggacattttgctttgaggcaggggctcttgtttctggtgttgccctgtgcacttgtattctaggctagttagctcaagtacttctggcaggttgtcctagatgcctgccacagcatccagccctgtgcatggatttaggcatcagacaccccagatacagaagcagagggtctctttcatctggctttagcacagcgtctggacgccagggcttcgctgcctcagttgatttgagggctgtctgccatagtaagaagaaattcattagcagaaacattactgtctgctgctgacaggagaagcacttaggtcgttgaagacagatggatgctgtaaaatgcattctaaatctttgtcattggcgtggctgaggaccgcagagaggacgcactggatctgtcattcattttccttttagctcagatagcccgacagagccttagacccatgtatcaccatccctcctcctgttttcagagtctttccatggtcttggctctgacagaacttgggggcatcagggggagtgggggagggaccactttacttcagtgtgtttctgcatttgttttctgtgaggctttggggtcagaggtagtctttaaagctacccagttgataggggaaatgataatgttttcattttgatactgtgagttgtgtgtggtggcttttgggagtctgaatgattgctgaaaacttcaaggccagcctgaactacatggtatattactactggccatcttgagctgtacacctgtatttgtttcagttctctagagaaatatactattggaatatatatatatatatatatatacacacatatatatatacatatatatgtgtgtgtgtgtgtgtgtgtgtgtaatattaaaaagagatttattagagtgccttacaggctgtagcccagctaatccagtaatggcctcatcttagttagggtttctattgctgtgaagagacaccatgaccatggcaagtcttgtaaaggaaaatatataattggggttggcttacagtttcagaggtttagtccattatcgccatgatgggaagtatggcattatctaggcaaacatggtgctagagaaggagctgagagttctacatctgattagcaggcagcaggaaagagagcaacactgagtctggcttggacatttgagatcacaaagctcagggctggagagatggctcagtgggtaagggcaatgactgctcttctgaaggtcctaagttcaaatcccagcaaccacgtggtggctcacaaccacttgtaatgagatctgacgccctcttctggtgctgtctggagacagctacagtgtacttatgtataataataaaaaataaatctttgctctagagcaagaggggctgaccggagtgagcagaggtcctaaatagatttccaacaaccacatgaaggctcacaaccatttgtatagctacagtgtactcatatacataaaaacagatgaatattaaaaaaaaaagaaatcacaaagctctcgaccccagtgacacacttccttcaacaaggccacacctactccaataagccacacctcctaatagtgccactcctatgagctgatagtgtcattttcattcaaaccaccaagggttgtctcccaaaagaaaggccacaagactggttgtctcaggtggtcttcggtctatatcagaatcccagagaagtaggttctaatatcagcgagggaatgcctcagtctcaggatagataacttgtcagtgagtgtgaggtcatgcatagcttgttcttccatgtccttttatggggactgcctctagaaagtgtggtccaggtttagggtgcgctatccagctgcagatgatccagtttaggatgggtcttcccatcctagatgattcagatgatcccgaataatctccagcagcttgggtttcagttcattccggatgtagtcacgttgacaaccgagatcagccatcacaactccatacacattaaataaaattaaagcaaaacaaaataaaactaatatttatgccatttactagtgaggataaacaattgttttttgactttatatagctgttcatttcttgtgttggactatctctctgtgtgtgtgtttttctttttcttctcttttgtacttttctacttcttttcttcctttctttttttggggggtgggtggggcagggtttctctgtgtagctctggctgtcctggaacttgctttgtagaccaggctggcctcaagctcatgcctgcctctgcttcctgtgtgctggtatgtatatgtgtgtttctatgcatgcctatcacatgaacatattttccaaccagcatgccatagtcaggactcacttgctaccatttgttgctaccctacaccagttccccattcctaacctctcaccattaagagaatatttatgtacttatttagacaagacttatctatgtatctcaggtggcattgaacccgtgatcctcctgcatcagccttccaagtgctgaaaattttcacatcctaaatacatgaaaattaatctgaagtctttcttacgtgttgtaatatgtaagaactagtgagacgaaagcttcagtgttcttgtgtaacagcgcagttatggcctgcttgagctgtgaggacagacagcatatggtacagacatgagcatctttattctatgattctgaaaaatttgtatccccctgccataagttgtgatcagacttcttaagcaaatggacatttgttttttgcatttggaatttgagaacattatttgagaaggtcctgattattttatccttttaaaaatatctaaccaaattctctatcggtattaattgaataatatattattgtttcagtacttgaagttccagagttatcaattaatattaaaactcagatttgttctgttgatttttgggctgacaggtcatcaagtcatcaagctgacatacaaggttctctggggatgagcatccctaaccctgtgcgtcaccctgagcatcagatggaccacccacagtggtgcccagccacagggcttacttctaagtgctgacactggtacggttcttggtccacagaggattgatgatggctaaatggagccacttgttaatggcttatggactgtctggagctggccagctctaaaagtctcttgagcagcagttggacttgatttattccttggacactggtggagcaggaattttgttgttctaagaaacacatatggaggctgattgtgtttggggacttccctacatgccactcctggaaaaaagtgaaggtggagtcagaatattttatgtagttggtactgtttagtgttatctctggaatgtgagaggtaggtggtgagtgctctggggtcctgggtccagttctatgtccctctgcccgtcactggtgtgtgacttaggcccatcttctaagctccttagtccatattctattctatcagtagtcacatagagataatgaactctcttcactgcttccaagttattctaaaggataatgaggccggatgcattacagggccttggcctttgctgaacagttattttggcagcccttccctaaggatggagtgtgtggagattacatagggttgttgatttgggctgtatgtggttttgcctgaaggacagcattgcttactgtgtaacttactgtgttagaaatataggttccctctggtttggtctgttgttccccctacctggaaagcattcaagagaacattcaagtctttgtcctcaccctgtctccattgttatgctccatagcatatgctaacttctaatgagaataaatgacggagtggtggagggattctaaccactgatcttagcattgagaatccctcatttgtcttctcctggcatcttcagggaggtgtggtgcctgcctactgcccactgttgctggtactgaccctcctttgttctgcgtttttttttttttctgaaaagcttaggcacggccaccactttcctgcttcaaagcttagcatcctttgctgagcactgctctaaagcttccttacgatgtttgaggctgcagctcatctcctttctaggctgtgtttcctgtcattccccccacagcttcacacctacccaaggtctggtttccatccagaagtttccaactttcttcacaggtctacctctttttcactgaagggcacttccctgattctggagtgtgtgtgcccacattctcagtatccccgtgtgacctgcctgctgagcagggtggactcaccatcttccagccagagtggctgagtctgaggggctcacctggggcctgacagccagctggaatctcagtcccggccttctgccatcctgttgaagaatcaagtcaaagttatcctgacttgtcctccaagagaacgactgctgtccctccctgctcttggctataggttttcctttatttgtgcatttattgtagcatatcaaattgccatgttccatgctgcagcctgcaggagagtccttcagtaactcccctcagcctgcttgcttccccagaactgcacctggcagtcatcaagaatgctgtttggattaaatacatgcactaataaattctgctttttcatatcctctcagctgtggtttaggggctacagcacctgtcagttacagcacttaagatcccatgtgttggaaaacacctgtattttggtctatagcataaacagggagtgataattattttgtttctctgacatctcagagacataatcaggtattttatcactagaggaaaggtgcttaacacatgtttaattatattttaggaaagtaaccttttagctaaattttgtccaacagcagctgtacctgggagaggctttgaggaaagcgagctcctgcaatctgttagcctttctctacaacagcattaaccaataataatcctagtcttcaattgggacggctggtattttcctccatcatgtgaaatgtgaaatagaagcatcttcagcaggtgtggtggtacacacctgtgatctcagcacccagggggctgggcctgggctgcctcgagagaccctggcaaaaccaaaagaacaaaaagaggcagtggtaggcttagaaatcctgttactgatctcctgtgtattggcctcaggacaagtctgcaggtctcttcctaggtgccattttgttattttgtttccaacttggttacaacacatggtttctagacacagtgtaaggttttggcctcattctttccttgggcttcttctttacctaactgcctctctgtcatctgttgtcaagtgaggattcagataactggcccttctttgcagagcccttctcggcagcttagctcagatggccttacaaagaggatgggactgaccagtgaagccctgtgtctctttacaacaggaatatgttctgaggaacatgtttctagaagatttcctcattgtgtgaacacggtgtggacttccaaacctaagtggtggtggagcttgctgtaccctttgactgtgtggaatacagcagagtataggctgcccagtgagtggtacgacatgttacggtgttgaattctgtaggcagttgtaacacagagaaatttgtgcagttgaataatttatacactagcaaaaggacagtgaaaacatgatgctaatgagacaaaatagcaacaggctatatacagcacaatttttgtggaactgcggggcttctgttccctagagtaatgcagccctgtgcacgagctctgcacttaggctgcaacacatggatgcagttttaaatttgatgacagctcatcttactgtaataaacttaaaaaaaactttttgatgtcaaaaaattccaaaccccatagcttagaacacaaacctcccttttttctttttcttgctgtttcttgctttgacaagtcccagggattaagcccagagcctcatgcattcagagatcctgtttcttctcttattccttaatgttcaaaaagtaattcttattagtttactttgtgtgtgtggtggtcagaggataactggtaggagtccaggggattgaactcgggttgtcaggcttggcagcaagcacctccacctgctgagccatcttgcaagcccattcttaattttttcctgtgaccagactcttggtgcagttttcatttcttcttcagtgactcagttaaccgtggacataaagaggaaccacccttctctggactgagccacattggctgggatctggagcagccatggaccaagcaaatggctctgcagagacatccacgtggacttgggggttgaaaattcgtattacaaaggaatataggacgcttctagcacaggtgtccagggcaccacgcctcgaggaattcctaagatgtggattgaaatctgggtactattgctgagccaacgcctcagagctgacactgttggagacaaaggaatgatatgaacactgactgaccataggaagcatggccctctgggatagggttacaggcttccttccagttcagccttgtgttaattttcagttttggttgtgggtttgaaggcctcccactgccacagctggagggtgagtttgtcacaaaccctgagcacgagagagctctgccagaaggtggtttgagtagtgtccagaggaaggagggcgtgcttccgttcccttcttagatcagaaaggcagtttcaactcggtggccctttcttttcccacagacggttttaagaccgaccacagaaattatatctctcccaaggagggacatacgtgtcaaatggcacaatttggcacataaattttgtccctgagaggctcacaaattccagagtctgtgtctgataaaaaggacactttcagtcttcctgaaaatgtggggggatttaaagcacatttagagatgagagcggggaaggctgttgtcatcgtaacatctgatacttgccattggtctgtgagtctgtcctgtcctgttccttgcctgagtggcttttgccctcaagagagtttggtctggggtaatgatttacccatatttgatcacatagaacagactagtattttgtttcttctacactctggttctgacaaccaagaaagttctttactaacgtttttgacacatctgaattgtcttattttgtgagatgaatgagtggtggttacaaggatggtttgggaactggagagacggctcagtggttaagagcacttgctgctcttgcagatgactaggctgtattgccagcacccgcatggctgctccctgtagctctatttctaggggatttaatgccttcttctggcccccaaccccggtaggttaccaatgacagaccaaagtaatgattctgtctaactagcttagtggacgagtgggtttatttgggcttactaaataggatgcaggtgaccccacacagctattgtgatggtttgaatatgtttggccatgggaagtggcactattaggaggtatggccttgttggaggaagtgagttactgtgggggtgggctttgaggtcctatgctcaagttctgcccagtgcagaagagagccccatcatggctgcctgctgaagaatctcctgtctgcccttggatcaagatctagaactcttgagttccttctccagaacaaagtctgcctgcaggatgccatgcttcctgccatgatggcaatggactgaacctctgaaactgtaagccagctccaattaaatgtttgcctttataagagttgcattggtcatggtgtctcttcacagaaataaaccctaagacaggtatgtatcactaaagtctcatccctgcctgggtgagacttcccttcactccttctccttagctgtatagatggagcatgcctttatttatcttctctgttctatctgacaggtatgtcccacatgtatcccacgggctgcatatgccccaggagagctgtgagtggggcccagtacaaatcggaacttactttatgtatgacgtcttgtaacttgattgatgcttcttgagcatgaactgtgtgtgtgacaactttgtgttgcaatatcagaagatgggacacttgcctgatctgctcctaggtcataacacaggtagagacagaaattaaatatggccaggaggaaggggtgctggagggagtggccctaatctcaggtgagggtctgatgatcctctgctccctgggatgcatcagtagactcatcgtctgctaagatgctgatggctgttgtgcttgaaggacaaggtggtgtgggacagccatgcgtgagacctagactctttagatgttgttgaatggcctgtcacttcagagtcttttccttttaatgtagaacaaccagatttgatgacgattggcaggttctgtgccccgtggccttgtgtgatgtgtgtgcagaaatgccagtggaagaatgaacattttgctcaattgtggttttttggctggcaggatcctgagagcaggctagagatgggcataaaagagagctggtcttagggagagttgtgtttttagttgtgttaggacagcttagtctgtcttcttagaaagctgtgtacttgactttgaagtctgccaagtagtatgtgcatgcattgaccaaacacaatacccatgaaaagtgagctaagaaagaagggttactttaggctcactgtgatgggaaggcaggggcaggggcaggggtggctggtcacattgcatctgtgctcaggagacagagagatgaacactgctgcccagctcccattctccttttgattcagggcagggcccctgtccatatgatgtgctgccctcatagagagcgggctttccacttcatttagcctagaaactcctgtacagacaacacccaaattcccccctccatggtgattctaaatcctgtcagagtgacagtgaggctcatcccttacacctgcaatcgccatcttcttgctgtgggccttcgttcttcgtttagggaggagcttttaggaatgcctctcctcctttagtgcaggtgactctttggcctggaatggccacactgctctcccctggccttgcttttctgtttggcaagtgtcctcattcttcttaagctgtcctagcaccctttgctctcgtttttcaaggcaaggagtactgtcacaaccagttttgctttgtgtcatcattagcggttttggcattcctactgagtggtttaaacacagatggtcttggccctgtgttttggtagcccggtatcgtcactttggctgacatcacttaaatgctcagtctgttgttgtaatagcggtgcctctttagaaggcatccataggaactatgtgtaaatccatcaactaggcaaatccttgtttctaaggatgtctggagcagggactacagtctggagatcatggaaacctggccaaagactatggactggggttttgattctgaaattcctttgaaggtgttctttttgtactgtgctgatggatgcattttaaagggtagggttactcataggaaagccagggaaacatattctgtttctaaaaggctttatcagcctatcagtgtggaaacaggtggtctgtgcgcgcacatacaaggaagagtctttgtcacataggaaatggatcaaaatccagagaaggaaagtataaacctgttcccagacagtaccaccttgcacaccgggctgaggggcctcaggacttggtggatgggtgcaaatggccgtggaggttttggagattatttgcgatggggtttctagggcagtggtggggaaaacagaaccttttacactagtaagagtaagtgacgttcaagagcttatacaagctagttaagacatacgtgaataactccagggttgaaaaggataatgtcttaaaaattatccagtgttgtatgaccatttcctctctgcagtttagaaaattacagagacattttataattatatgcacttgccagctttactgaaataataaacaactcccaaagcccaaagcttgcaacagacattaatttcaggtcatgttgtgttttctggctgtgagtcagctgtactcgctcttcccaaatcttacatttctgaaggaacagtcccttttggggacaaggtaggcagagaaaaaaacaagagactgtgggagacacaagaattcctaacagtcagcttagatttggcctatgctacaatcattcatttcccattgactagatcaagtcacatgacttaacccaaagccagtggtctagagtgttttcctgtaagaagctacttggaaacaataagaacatgtgatcctctcatgggaagaggggccagtcacttggggtgtcctcaggaagaacagccagtgcccttaaccacttaatcagctttttaaaaaattaaaaagaattatttatttactttttgtgtatgaatatcttgtttgcatgcatgcctatttggtaccctagaactggagttacagatggtttgggtctaccacgtgggtgctggcaattgaaccagggtcctctgcaagagcggcagtgggccttaaccactgagccatctctctggtcctttgacatattgtttttatttttttaaagatttatttattttttatttatatgaacacactgcagctgtcttcagacacacactagaagagggcatcagatcccattactgatggttgtgagccaccatgtgattactggaaattgaactcaggacctctggaagagcagtcagtgctcttaaccactaagccatctctccagccacgacatattcatttttaaaagtttatttagcaaggcggtggtggcacatgcctctaattctagtgcttaggaggcagaggcaagtggatctctgagtttgaggccagccttacctacagagcaagctcctggacagccaagtctacacaaagaaactctgttttgaaaaaacaaacaaacaaacaaacaactaacacataagccataagttttaaaatacggttttaactgttactttattgttggtatatacaataatttccttttttgtcattttggtagcagattagtggttaaccctcataaagtgacttgggaggttttccatggttctatgtgtgccttggaatacttgactaaggcaggctttgggctccctggggctcagctgcaaacctactggcctaggtggtcgttgttttcggccatgggtctgtcctttctgtcactgcccaactgtggctttctggacttagagtatagtaacttgtaatatacatataacttgtaatcatatagagaaataagatctaaatagttatatttttctttctatattggacaggccttgtaagttttactatgtctagtccatcttctaaaataatcagagtttgtccctttttcttgttttcagtatacattttaagctttctcacttttaacaaaacgagagcatggagtagatgtgactggatgtgttcatgctgtgggctaaagccatctcctgcatgtctctcgctgctgtgtgaactctctcctgggtgtgttttcttgggttaagttgatgaggtaatgcaggcttaaggtttcttttttctttttagtttgtttactcatggctgatgtggttataacacatgtctgctattggccttgcgttagaacaggtgaattggactggctgtttctgcttgatgttgctagaactatcgtcttgagttttttacttgtaatcactcgaacaggacaagggtgaggggaaggaaggctgggtcctggcgttcctgtagaggaaagttggcttggctcatcctagggtctgggttccagtggcctgatctccatggcagagcccacccctctgtgttttcagctgtgtctgttttgtgtctgtgaacatgtctagagttgtctgcctgggttcatctgccctcaataatgcaccaaaaaccttgtgggcagggtgccccctgctggtggtcctctgttatgctttgttcttgtgcacctcagccagaaaactttctttgtctcattgtcttacctaccccaaccccacaactgcattttcaaattagggtgcacatgacagggttgtttgtgagcctcagtgacagtaaatagcctcaaaaactgttaaaggtgccttgtggttcccacttcagctgtgtcccacttgtgtctggtagaacattttagagagtctggcacttgggtgaccctctcctgatttccagagtcatactgcttttcctatcaccttttacccagttctttttgttgcctattctttagattctaagttagtgtctgagggtaggatggagaggagtaagctgctgtgggtaacttactgagatggtctagaagtctatatttataattgttgtctgtctgtttgtctgtctgtctatttttttccttccttccttccttccttccacctacctatttattctttaagcctagctttgctctataatgcaaactggccttaaacttgtagccccctgcctctgccccctcagtgctgggtttacaggcaccgtcctctctgcccagcttttataacaagtgtgcaacattttgtcttgctgctgtaaacaccatgggtcctggttattttccaggtttcatggtgtttgccgttctgttctgagtatctttgacaagcagcttttgaggtttttccttttaagttgactctccctagtgagtttaagttgaggttcacagcagaatcatctgtttgatctgtgtaggacattctttctttaggtgtccactgtgcatgtgaattagggcacacaaggcaggtacaggctgtgtacagagtgctgtccttctctgctgtgggctgctgtgagctgctttgccaggcttttctgaagtggagtcatcacattccccagattttcccagtggtgtcattagagaagctgggttattttagcatgccttgtgtttcactgcatccgtattggttcccggtagatgtcattctgcctttgtaaacctgttaacgtaatgaagaatcccaccagagatttctgttaattatcttgctaacagatggccataacagatcttgaaactgaaaatctttgaaccagaggagtttgtaaagcaatgaagttctctctgtgtcttccttggatatggggtgatgggcaggggacggaggaaggaatgttcttacaggcgagagttgacattttacagcagtgagtatttttttttttcatcagcaagcagttaccatagttcacaagaattattctagataggtgtttgcatgataaaaccagcaagaaaatgaatttgaggtaccagctatgtctctactgtgatttttttttcttttcagtaacattggtgtgcccatggtaaaccctacaccacagcttataatgaaatgtaaaggtacttaacagacaaatcattattattatttttttaaactgaacagtgacatgcatcttgccatgctctcacagttcacacacactcctctggtactgccctgtaaatgtgattttgctggtatttcctcagatgaagtgatgagaggagagccatacttgagctttatgaatacatggcttgggttgagcccagaacgtttttatctaactatccctaggcctagaagcttctagcctctatacaatctaaacttctgcaagcctggaccttgaaggcttccccttccagcctctgtctgctatcgtaggcctagaatgtttcagcctctgagacttacactgaataaactcaccctttctagctctttctgaactctggatggctggtcaactcagctattctgactcaaactcctctccaagctgactgattcaaaggcttctcttgacttctgactgaattgctctgcttgaaaagacttgcctctgaactccatgtgctgaattcaactgcactcaactgaacttctgtactttcctctctccctcactacttttaagtagcatctctttcttgtctgttcttgtgtgagttgggtgtatcctatctctgataaattctgtcaaatctttctctgattcatcactttgtctgctcctcaagtagttgtcattgtttgggattaaaggtgtgtactaagagtgtgtctgtattgcattcagagggatcaagggtatgtgttccagccagagggattaaaggtgtgcagctgtctgcattccagccaattcatagctttggatgtgatctcttgccagagctgccatgttgttggattaaaattcttctgcgctcccatatactgaccccctcagtgctgctgtacccttattgcaaataggagagcttaaggtacagtgtccctgctagtggaggcaagcttttaacatggccagtgtggctcaggttacccttggaggtattctcagttcccaggtgtctatctggtaccttctgttgttctaagactcattcatctctacttttcgagtcccccccccacccccccccagtacagcatagtctctgctttcatggaattcacagatgagtagagagtcagacagtcaaatcagtgaatatgcaataaagttcaaataatgataatcctgtgggaaacaaagctggagaaggagttgaagagtgatgaaaggatacagggttacttttatattttactggactgagatgacctcttaagtgggtagcttccagcagcagcctggatgaagagggtgggtagccacatcaggatctgggactgggacacacactcggacacacacacactcggacacacacacacacacacacacacacacacacacacagagcgagcgagcgagagagagagagagagagagagagaacatatagtacaaagttctgaggtacagtgagcagtgtcagccagaaggccagtgattgagagtaggaggaactcagggagagaagtagtgtgtggaggaggggagggggcgggtcagtaatgcctgctctatggaagtgagtttagacttgtgtaatgggatggttttgagaatttaaagcatggaagcgacatatttggatttatatatttttaaaacctttttttaaaaagccacgatctcattatgtagtagtcttggctgtcctggagcttgctgtatttacttatttatttttgattctatacctatgtattgtgtcagtgtatgagcttgtgcacatgagtgcaggtgtctgaagatgcccttttttttttaaagatttattatttttatgtaagtacactgtaactaacttcagacacaccaaagagggtgtcagatctcattatggatggttgtgagccaccatgtggttgctgggaattgaacgtaggacctttggaagagcagtcagtgctcttaaccactgagccatctctccagcccctaaagatgccctttagtgctggagtcacagacagtcatgagctaccctatgtgggtaccctttgctaacagctgagtcagctttctagccttggatttagtttagttttgttttgaagctccctagctgtggtgtggagaactgtgtctgcattcatgttggttgtaggtggtgctgccagcatgagatgatgcctactccactgctgagccctctgctgagctgagatgcctggacccaacccttgctcatcacctctaagctcttcgtgtttttctgttgcttttgtttctcatggggcagtgtcttgagaatcattttgtgataaacttatgaccctgaagaaaatgttggctttacctgaccggctttatgtttacctagaaggatctatgaaggagaacggagaggaggaataggctgggaaaattccatggaaaggaacatgggctcaaccgccggtacgccaaacgctagggcaggctaggtcctctcttcagtgtgtgtcctcatggagagagatcacggctgacttgctaaccttgcaaggctgtcatgggtgtggtcagagtgatagcctctctattccagagactttgggcactggaggttcctcagtcgttcccatgtgcccacctgctgtggggaacaccctggaacgaggaactacaccctggctagggagtcccaggagggaaggatctgacctgatttgattgcttgactctccctataatcagggcatttcagattatatgtggctattcctaaaggttactggctaaggtccctagggcaaagcctaggaaagttagcatagggtctttgtagaccagggaaagagatggcaggtagataattacagtagcacagcacacacacatgtactcaggcacacacaaggagaagccattgttggatagcttatatactttggataagtcgggtgtataaaagatttaaacagatttttatgtgtgaatgctttgcttgcttgcagatatgtatatgcaccacatgtatgtgtggtgcttgcagatgccatacagaacttttttagatactttagaactagagttatagacagttatgagccaccaggtgggtgctgggaattaaaccttattagtcctctgcaagagcagcaagtgttcttagccactgagccatctcttcagcccctaggtcaatgattaatattgatagttgctccagtgcaggtgcctaccaaatatacacaggagtgggtcagggaagactcaagaagagagagcatctcatatacttggagacatctatctaagatgaggtagatttcagagacagtatgtgacaacatggtggcttctggaagtggcccggctaggtcagtttgagctgattgtttggccaaggatttttatttctttcatacttttgtgcagtggttaggcctagcggatggcctctcacgctgccctgtggttggaagcatagctgagacaggagctgtcgtagggttctattgctgtgaagagaccatgaccaaggcaactcttataaaagaaaacatttaattcggggctggctgacagtttctgaggcttagttcattaccatcatgatggcaaacatggcagtgtccaggcagatgtggtgctagaggagctgagagttctatgttgatccaaaggcagcaaagaggagactggatgtgtttcacactgggagttacttgagcatttaaaacctcaacgccctgcctctacagtgacacacttcctctaacaaggccacacctcccactggtgccactccttatgactaagcattcaaacacatgaatcttgtggggggtcatacctattcaaaccacctcagaagcacagtgtagggttgggagtttgtacccatgagtgtcatctgtaaagatgacaccactttaatagttatagaaacttatttttaaaagacaggtctctctctctattatatagccttggcttcctagaactctttctatagtccagcctagccttgaactctcagagaatctacctgcttcagcctttcaagtgctaaagttaaaggcattcaccaccatgcccagaaaaccttttatttttgacattgccttaagtgtctgattacatgatctgtggttggtgcagatgggagcaaagaaaagaacgttctgtgtgctctgtcacccacctaggaggatgacatttctcttcaccccaggccatgctttcctgtcttgtctttttctttggggtctcctctgatcaactgtagctcatggatatgactgccaaggtgacttttaggggacaggtcacagcagcctccagagcacttcctttaccccactctatgatctgggtcaccaatgcctttccattgctatcatgtcactgtcttgccacattcttagtctttgtcttgcagtgctatcagaggtaacattcagggctctttccaacttcttctagacagggctctgttcccttgttaagtcctaacaacaggaccattggactgggcctttgtcttagttagggtttctcttgctgggaagaggtgacatgaccatagcaactcttaattaaatgtcttaaggaaatcatttaattggtgccggcttacagttcagaggtttagtccaacatagacattgcaggaagcatggtggcatgcaggcagatgtgatgctggagaggtagctgagagttttgtatccaatcagcaggcagtaggaagagacactggctcaagcatttgaaatcccaaagcccacccccagtgacagttcctgaatcaaggccacacctctttatagttccactccctccctgtgagcctatgggagccattttcattcaaaccaccatagccttttaaaaatgttatatttgtaacaaattcttaacatgcagtttattcaggtagctttacaccttcatcctaaggggaaagaatgaaagctgttgttttgtaagtctgttggccttcctttcttccttttttcctgcctgcctgtcccacccaccttcttccctccttctattctaccctccttctatcactctctgatatttttctgtctgaaaatctctttgatcattttaaatctgaatttgtgaattaaatacaaaagaggacagattgtatgatgggctaaggtgctggttatcaaggttttggagacatctgggaaggtgaacttcagttgagaagataccttcatcagattgtctgtggcaggtctgtggggcactgtattgattaatgattaatgtgggaaggccacactcactgtaagaggtgccatccttgggcaggtgatcctggggtgttctcaaaaagcaggccgagcacgccatggagaagaagtcagtaagcagcgtccctccatggcctccgttccagctcctggttgaggtcttcctttgacctgttcatttgagacacgtggagtgaacagaagcactggggctgtcaaagttgttgttgaggtgtttctgcggtggctgcggcagctgtggttggtgaggttctccatccctgtggtctaaggatgctcttctcttcctccaggatctcatcttgcccaacggtggtactccagcaggcactgccagcccagcttcttcatcttcccttctgaacagacttcagcttgatgatgacattgatggtgaagccagagatctctttgtcacagttgatgatcctaagaagcacgtctgcacaatggagacctacatcacatacaggatcaccaccaaagtaggtcttgtttcagaatgtcggggttcagacatgtgcttttgtgtttggtcagttgacacaggccaggctcatctggaggagggatctccaattaaggagatgcctctataagactgcctgttggtaagtatgtggagcattttcttaattaatgattggcatagtctcagcccagtataggtggtgccacccctgggcaggtggtcctgtgatgtataaggtaacaaacatgagcctccagaagcaagccagtaagcagccttcctccaaggtttctgcatcaattcctgcctctaagctcctattgggatgtgtatgccaaatagaccctctccttccaaagtttggtcctggtgttttatcacagccgtaggaatcagcctagaacagtgtgaactgagatcctcttagaacctagagcagtgctcttcatgaactggggtcctcccagaaccgcagtgccctttgtggactgagaccctccctctgcctgtgcttcgtctcctctggttactcttactatagttatgggatagaatgattatattaaaagctaaaaggattatatacttttttattcttaaaatgaggagaagttatggctgaagtagtttaaattaaacatttaatccccatgatacctctgtgtcatatgccagttttgcttaatgtgtccatttcacaatatgcatggccttatatccacttaaatctgtagtgagaccctggttgtaatttggcctaaatgtagttaaagacagaaggggcctgaacctaagccttgtgacggcctgccatgccttctaccagacagacaggggacagttttcacagcaatcctaaaaggcttttgttagttagaattttataggtgaggaaactgaataacttgtatggggctacaaaattgttaagtatgtttctaacatgaaaatttaagactacagtgttcccattctttatataatttccttgtaaaagaatactttaattcttactctttggctgaagggtggggatagatcctagcgccttatgcctgctgggcagataagcactccaccactgagccccatccctaggctgtgttgtttttcatgcagggtttcttgactggcagtatccatcttttgggatgagcaacactttctgtaggatgtgtagtgacacccctaggctctgtcactaggtacttgtagctgtttccaactatctccaactccctttgtgacaatcaaatatattcagacactgccagatatctgctggggatcaaggttgctccttaataggaaattgctgatctaaatcatctctattactaaggagaaaattcttaccatcactttgtattttataatttaaaagtactttacaaaaagcaaaaagacagggaagagggatggggacctggcagagtggggtggggcggggagaacttggtagggttaggagggattaagagggaggtagcgaatgtgaccaggatatgtgtgtgtgtgtgtgtgtgtgtgtgtgtgtgtgtgtgtgtgtgtgtacacatatgtatgtatgtatgtatgtatgtagtaagtgctttagtcaggaaagcattctttttctgtttttcctttaccacaaatcacatactgtggaaagaattacagatgtttcatgaagttttatgggtggtgttagtagctcagataaactgcatctctcttcttcttcttcttcagtcctcagcctctcacaccccagttatattgggaattgaacttggggcttcactcatgccaggcaagtgcagttccactgagccatgttcctggcctcctttttacttcaattaagaaaatggtttattaatgattttttttggggggggtggctggagcaaggtcttgctgtgtgtagcccaggttgaccttgaactcgtgatcctctagggtgacagggtgtgcctctatacccaacaaacttttttttaattgtaaaattttggtaggttctatacctgtttaaattattaggaaagataaacaaaatgaaatatgttcacatatttcttcatcttttattggatggaaatactgtgttttaaaatcacacaaatagtttaactggttgtaaaacacaaacaaatacagaggcgcaagcctggcctccctgttctcctcggctgacaatcttctcaccagaagcagccgttgctgcagtggtgtgcctccacttctttcatttacggcacacacgtagagtacacacagtgtgggttccagtgcgtgtgcgctcttgcttttcctcccactggacagtgctgctgaggcccttctgctcgcatcgttatgcttagctcactctctgggcctctgcctgattatgcaacgattatacaaatgtcttttttaaaaaaaatttttggtggacatttaaaccattctcagctttttaaagtcaccccaccccgtcttttcgcacctggctcccgcgcacaggtctgagtgagggcctggggtgatttgcatagctccaggaattcttagcatttgttacctctccctcggggtgaggttacttttcaccctgcagtcagtaaaacacaaaacctgcttttcttgattgggtacataagcaagcggcctggtggcagggtgactgccttgctggcaagcagcccttatgcaccctgacagttttctacactgcttgattcctgtaccctgcagtcctattcctggccacacacagtaaagagatcctgcagggcttacccgactcactggctaatgcacctgctatcgctcccccatctctcctctccttactccatcctagcctacccctcccctctgcattcttatctctgtcctttctcctggggttatttgattccttgtaactgagaaactgccatttccaaattatatcctggttttccactggggtgagcagtcactgctgagaccttacgttttattatcatgataggtagtgacatctgggaatgagaaagaggaggatgaggtcacaagatcctgcactgggacttgcattctgctgaggacctcagacagctggtgcagggcaggcggtgctacaggttcaaggctctgattccagatcctctaaatgatgagtgtggtggtgattgataaatgatctctccaccagtaaaatgggccaattcaagccagattaaaaatatataaatgcaggtttattgggaaggtgtcctgggtgggtgagtttgatggccccaaggaaggagaccagggaagtcgccatggggaaagagagaggagagagtgaagagaacgtgtgcttgctcacaaagaaggaagaaggggctgggaagaggatagagaagaagaggaagaggaggaggaggaagaaaaggaggaaaagggagaaaaggaggaggaggaaaaaccaaaatgtctgagttatacagcaaagagcctctggaagaagggcagcccagcccttgggctagagagttcagggttgggggcagggtatgccaggtagggactgaaggatgctgggagaacctggaggctaggtctgctttggtatgtaaaatatgcacctcatctgcttgttctggggcctgaaaccaactgatggtggtggtggtagtggtggtggggttggtggtggtggtgagagacagggtctcactatgtagccctgcctggtctggaactcacagagatctgcccacctctggctcttaaatactgcgactaaaggtgtgtgttattatgcccctaattcagactgtttctttttttaatgtttaacattttactttatatgtatgagtgttttgcctgcatgcatgtctaggtaccatctgcatgtctggtgccctttggaggccaaagccagcgttggatgccccggtactggcgctgcagatgatcatgagctgctgcgtgggtgctgaggcgcaaacctggtctttggagtcatccaccagtcttgtccactgagctacctctctggcccctctaattcagattcctgacgactggtacagagccatattgcctgagctgaaattagctgaaggcattttgttatggagtgctccatcaaatctctacggttcttgtcttcctctgtgacctggaggtcagcacagccccttctcagggctggaagctcctggctgttttctcttcagcctcttagaaagtcacaacacagtaacagctaattaattattggacacttaaccacgtgtctatccattttgtggtggaaatttcaatttttattttatgtacttaatctgttgtagaaaacagaaaaggaaagtaagctaaaataatacaatgcaaacatgcccataaactcagtcagaagtaactgtgggatgcctctgttctttcatgaaaatgagcatttgtgtgcagccagctcattactgcactgcagatgctgttctgtgctagcaagttccaggcagcacgcttgctgtcatctgagactagagtcctgttctctccacgggatcgttggttttgtgtgtgtgtgtgtgtgtgtgtgtgtgtgtgtgtgtgtgtgtgtgcagctgctatcatgactgtcgcaactattcttattgttaaaacggaacttcaatacagtgacatggatgtgattgctcagtgacatgtggctaccatgcagtgtggctggagtttgagtgcagagaccattctcttaatagctgtgctgtgctgacatgatggttggtgtgcactgtcagttggagtggagctggagtcacctggaggcacagctggggttgtgtctgctactcagtcatttccatctcctttgctttggccagtttctcattggaagactcagttggctagagcgatgtggtttgaggagtttccctggtactgtttgcaaatgaatgtgaatgggaggaagggggaaaagatgtgagcagctagcttggcagtgaagcaagaacagagcatcaagaaacagcagtactggttgcttcatattgttcttcctcctatggggctgcaaaccccttcagctccttggttccattttctagctcctcattggggaccctgtgcttagtccaatggatggctgtgagaattcacttctgtatttgtcaggcactggcagaacctctcaggagacagctatatcaggctcctgtcagcaagcacttgttggcatccacaatagtgtctggatttgggaactgtatatgggatggatccccaggtgggacagtcactggatggcctttccttcagtttctgctccaaactttgtctttgtatctgctctcatgggtattttgatcacctttctaagaaggactgaagtatccatactgtggtcttccttcttgagcttcatgtggtctgtgaattgtatcttgggtattctgaacttctgggctaatattcacttatcaatgagtgtgtgttcttttgtgattgggttgcatcactcaggatgatattttctagttccatccatttgcctaagaacttcatggattcattgtttttaatagctgagtagtaatccattgtgtaaatgtacctcattttctgtatccattcctctgttgagggacatatgggttctttccagcttctggttattataaataagactgctatgaacatagtggagcatgtgtccttattacaagttggagcatcttctggttatatacccaggagtggtataactgggtcctcaggtagtactatgtccaattttctgaggaaccgccaaactgatttccagagtggttgttaccaacttgcaatcccaccagcactggaggtatgttcctcttaaccaaccagtacccccagagctcccagggacgaaatcaccaaccaaagagtacacatggagagacccatgcctccagccacatatgtagcagaggatggctttatgggacatcgatgagaagagaagcccttggtcttgtgaaggctcagtgccccagtgtatttcaggacaaggaagcaggagtggatgggttagtgagcaggggaaggggctgagaatgggggggacagtttggaggggaaatgaggaaaggggataaagtttgaaatgtaaataaagaaaataataataataaaaaaagaaacagcagtaactgcaagagtgtgcttgaatgagagagctgtgtgtgtgtgaatgtgtgtgtgggtgtaagtgtgttagacagagccttgctgacgtcatacttgctgtgtagcccaggcttgcttagaactcttctgatccttcctgcttctgcctcctgagtgctggaattagagctgtgtatcactgtgtctgtaatatgcttacgtgtttttatttctgaggatgaaggagaattaagagcaagatggacagggctggcgggaaagcagatatgggtgaagagtggagagtaagccggaggaagtgcaagctgtgccctgcggataagcctgtggtttggcctccaaaaagagaagcacactttctccattgtctggaaaacggaagggaagcttgtctcgtgacaggaagggaagggactctttgcttatagctgcagttttatctggggcagagtgagaagatcatctggcaggaatacatgggaggttttgaagcaggacttacaagttttgaggtgtctacagctttttcctaattgatgatgggactgttgagattgcgtggtgctgggagtgttggagctgcttggcagtgttagggaccctggtgtagaggtgttgctctttacctgttattgctacaggcacaagagttatcagccgatggtcttagctttagagttgttggctaaattatttcagtgttttggccagtttcattaaacccaccatagattcttttggcattggagactgtttttgtacaatttaaaaatttaaaacatctattcaaaatccttgggtgcctgtaatattgtctgtaggatagaagtctgtagggcactgggtttcccagagccatttgccatctagactggtggagggggaccttttgtggtctgtggagtctaggtccaggctgtcttgctgggtgtggattagattgtgggctgatgctaatgtttccagagatgactaaagaggtgctcaggtgagcatacagtccctctgtgctcggttactgcctcagatctgactggggctgcccgctgcctgcggtgatctctgatggacaccataggttctagacccagtgtggagggacagggtagaggtcttcgctgatgatgatgactttctggttcttccccatcccgttctgtgtactgagtttcacagaggaaagctggcagtactcatccctggggcttgttgagcagcacgctttatgaatacttgactccgctccatgaagtcagcagtgctcgtggctgactctgcagcggagttgtgttgcaagcgtgcagtgctggcttcgctcttggctcttctttgctagaatccccgttcttgttttccttgcatctttcccacctatttaatttatgtcatttgattctatgtgtcagtatgattttcatagaacgagctgtggtaataaagtaaattttgagtctaaaaagaatgagcctttctgtttcatgattatatttaccctgcggtatcagataaatatctcctgtcctgtggtccctaatggagtattgatggggccggagagatggctcagtggttaaaagcactgactgcttttctagagacctgggttcaattcctacaccacatggcaacttataaccacctccaattccagttccaaaagatctgatgccattttctgtcctctttagggatctagtaaagaaatatgcacagacatacatgcagcagaacacccatacactgtatatgactcagtggataaagtttgccatacatggtaaggatcagaatttgagtcctggacctcacgtaaaactggacatggtagcgcatctgcagtcccagtgctcctactatgagatggagtttgaggcaagaggatccccagaagttggaacaagcagtgctcagcaccaagagatcctgtcttggtgagcaccagggtgagcacctttaatcacaacatttgggaggcaggtgaatctcaagttccaggccaggctggtctataaagtgagaagtcccaggccagccagtcaggcctacacaatgaaaccctgtctcaaaaaaaaaaaaaaaaaagtatttttttttaatccagcaattttatccttaggaaattattttagtgggactaatggatagaagcctgctgatgtttactctaacattgtttattgattaaaagattagaaaccatttaaatagcggtttggtttaatcatgttataacctcttagttgaatattatgcatgtgttaagtgattgtaatgatctgggcacaaaggtgttccaggtgtcttaatgtgctacagaaactgaatgaatatgtgtagaaaaagtggaagtttataaacttaaatattaatttatttcctatttagagggactgtatacatttttatatttttcagtcattatttttcttgaagttttaaaataatcaaatatgccgggcagtggtggtgcacacctgtaatcccagtactagggaggcagaggcaggaggatctctgtgagttcgaggccagtctggtctacagattgagttccaggacagccaggactacacagagaaaccctgtcttgaaaacctaaaacaaagaaacaaacaagtaaacaaatacaaccgggacaggcagagggtggagctggatcgccacgtatagaaatgtgcgtagcaaagcacagcgtctgccctgccttttgtagttaccacatactgatctatttcacggagtagacatgttacataaatggtagtttatggaattgatttggtgaacatgagaaacatgattgatttgatcatggaatatttaggaaggtggagggagaggccctttacccattcacagtgaaaccaggttgctttcctttctcactgcagaccagtcctcttctggagtctctgggtgttgggaggggtcttgaaagtatcccactcaatgcttctaatgttggggctcagggcggctctgtgtttcctaggtacttatgacttgagggactggatggggagctggtgcaatccttgagggtcagcgttccccttccggttctgctcagaccaagcgcacagctttgtggtgaacgacatcctaacctcagagcctaggctgtccacagtcttggtcagtgggtgactcttccttaggtattttaaagattttttggacacctcagattaaaacagactttgggcttgaaagaataaacttgtgaaatgtggcttagattggttttnnnnnnnnnnnnnnnnnnnnnnnnntccataagtaaaaatcatattttggggtaaattaattttatttaacgttggtttattattaaagtggcattattatatttcagagaactttaaaaaattagcattagggtagagcattaacattttccacacacaatggtgttttgttatcttttttctagatattgcctcatctagatctaacatgtagtatgctatcaaggtcattgttctggcagaatatggtagttgaagcaaaatgtcttccttccttccttccctccttccttcnnnnnnnnnnnnnnnnnnnnnnnnnnnnnnnnnnnnnnnnnnnnnnnnnnnnnnnnnccctccctcccttccttccctttttcttttccctttgtttttgtttttgtctgactatgtagccttcctggcctgggactccctatgtaggctagccaggctatcgttgaactcgcagctttccttcacatctgccttgagtgccttagactgtgtgccgagggagcagtgttctgtggtctctgcttgactggtcctcccttcagcaaagcttgtcagcatgtgcaacagggaaacaccattcctcctcgccgatttgtgttggttcagcagtatgtgaaattacattattcaggagggaaaaaaaacctacaaccctttcagagttaagctggaggaaattaatcaaatgttctagacaattctgaagaataactgagtttcatttcctgagggcaggaaaaaacatccccctcaaaaaaaaaaaaaaaaaaaaaaaaagcaaaaaaagcaaaaaacccaaaaatccaagccaaaccaaaggtcttatgtttcctagctcctattgatgggtggatggatcgattggtttttaagacaaagggtttctctgtgtggccctggctatcttggaaattgccttttagaccaggctggccttgaactcagagatctgtcagcctctgccccctgagtactgggactaaaggcgagcaccactgtgtcaggctccatcctagctccttgactgtgcagcctgctggtaaactgccattcagctgtgcatgggcggaaggaggggtgtcttcgccttatttgatttctgaaagtgtgtgtctccttcccctggccagaaaacactcctcctcacatgtgcactcccctctctcttcttacttgcagagcacacgggtggagtttgacttgccagaatattctgttcgtcggcgataccaggatttcgactggctgaggaacaaactggaagagtcgcagcccactcatctcattcccgtaggtagtaagtcactgctgcttgttctatcttttcccgagttagacccacacgggtagtgctcagttcttagcagtgatgggctcactcagcattttatactgaatgcactcaccaagagtgcatgcaagatagaggtgaagtgtctcacactctcagcttctactctgcactgccagcctgctaggtaaggtgggctggatttttacttttttcttttctcccatcctcctttctttcttttttttttaaatttttaatattttttattacgtattttcctcaattacatttccaatgctatcccaaaagtcccccataccatccccccatcctcctttctttaaaaaagaaaaaaaatacaaaacactatttatgtatgtgtgtgtgtatgtttgtgcatgtgtatatgtctgtgtgtgtttctgcacacacatgcatgtcataacacacatttgaagtcagagtgcaacttcaggagttggctcttgctttccacctggttgcatggtttctcttatttctgctgctccctgtagtcccggctgctggtgcgtgcgtgtggtgagtctcctgcctctgcctcccatctcagttgcaggagtgctggggttgcagatgtgcaccactgcatccagtttctcacatgggttccagagactgaacttggcctatggagcttttcagttagatcttttactacctgagccatctccccgctccctgtctctgtctctccatctgtcctctgtctctgtctgtctctctcttatgtggtactgagggttaaaccagggcactcatacttgctcttcatatgctctataccgagttggacccctactctttgaggcagagttttactaagctactcaagctggccttgagctcattttgtagcctaggagagctttgaacttggaggcagcgttagctccttcagtatttaggactacaggattacaccaccctgctcaagtttctttttcccagtacaagatattatcttatttctcaagctggcccagaactcactatctaacccaagttagcgtcaagcctgtggcaatcctcctgcctcagccctgtgtacagctatggtgcctggctctgattttcacttgtattattactgtctgtctctgtctgtctctgtctgtctgtctttatttttttgaaaagggaaatatcccaataccccacctctttaaaagactgaagtttggtagctgggcattctggtttacatctataattctggcactgaggaggtagaggcaggagtattactgtgagttcaaggtcatcttgggctacataatgagttccatcaagtctctgctactgtacgagacagtgtctggaaaaacaaacaacaacaaaaagcaaaaagattgatgcttggaagtgagtctcaccgaccaaaactgcttttcccacttggcagacattcttcttgaggtttggctgcctaccaagaaggcaaagccgacgcttcagattgtggccaatggggacaggaatctggcacaccatcccttcacaaccacagttttttatttaaaactcaagcaagaaaaccactcactcctctgtactgaagcaacgtgaatggacccaccccgtacaactccctgccccccccttctaaaatgggtgataactaaaattttaaagacctaataatcaatatacattgggtagttttccaaggcctttaagttaagataattattacttgtctttggagactttaggaaagtttagagcgtatgactattcaaaggccaatttatcctttgacaagaccttgattgactaaccccaggggctgcccagttcccagtcgtatcttcaccttctcacctctgtcacccaccatggctatgtgtgcagtgaatactggatgtttgtagggttttgaggtaaggtgatccctgtggccaggacagggctggaggcaatggggcccgcaggaatccgctgtccccagacttctcttttgccaccctaagtcctgtctggtcttttgagtctgcttctttacttttctgccctccagtcacttaagaacgtgcctgaaaaagaagcagccattttaaagcagtcggaacaagaccttaaaatagaatcctacttggccaaattggcagctagtggtaattttttttaaacatatgctttttatttcagaagagttttcgggttattgtaaaaataggagaacagggtttcccatactcagtacccagttgcattcatggctaacattctgcacagatgtgaaatgcttgtcccagttaatgggctagctggcgtcatcatttgataagctttgtttactcggtactttattccgaggtgagtattttgcctgatgtgtttcattccaggctccctaccaggacatcggtcatacataacccctttggcagtttttgcttgtaacagtttctcaagttttcctggtctttgacaacctttgacagttttggggtttgctagcaaggttcagtggacatttgtctcaaggttttcttggttagaccatgaagatggagtaaggtgtttaggagtagaaagccaccgcagtaaactgttaatccaggtcacatgacttaggggtttctgttctctctttgctctttgcagggaaactgttgcccaagccctgctcccctcttggctgttctgtttcttttctttctggtttggcacttgagactcaaaagctcgagagtgacacctgctggtaaaatgtagtgccaccagtctgtagctcccacgaggcagtgtatgtgtctctggaggatccagatagtcttctgtagtctccagaagactggagtctacagaagactggctgggcagtgtggtgggcagggaagtgctttagaagcaggcagagacttaagtttcttcacaagaccttgacccttagctgaagtagagagctttaattcagggaagtatttctgtttaaatagagaagtcaaatgaggaatgaacacatcatcctacagaaactgttagaagtcacctctcagtatctaagcagcagctgcgtcctcactagacccggtagctaatcttggtaggaacgtagatagggtgaagaattttaagatagacaagggacctctgcccgagaactgagtgtcgcctgtaaacagaggcggctgtctcatcagcgcagaggttaagagcacttgctcttcttgcagaggacccaggttctcaacatgtgcatggtggctcacagctgagtataactccagttccagggatccggcatcctctggtatccacagtcactgggcacacataggaaacatagacatacatgtaggtagaacccccatacacataaaaatatattttttaaagaaatctgaactaaaccttaacaaaaatggagaactaggtaagtgtgcggcataattattgtttaggttttgttgtctcctttaacagagaatttatttttaaattctttattagacttattttatgcgtgtttgcctgcatatatgcatgtgtaccatatgtgtgcttggtgtccaaggagctcacaagaatagatctctaggaactgcagttacagatggttgtgaatcagcacacggatgctggaatcaaacccatgtcctctgaaggcacaagtgctcttcatcaatgagttctgttttgttttgttttgttttgttttgttttgttttgttttgttttgatacaaggtttctctgtgtagtcctggccatcctgaactttctctggcttctaactcagactaggctggcctctaactcagagatttacctgcctctgcctcctgagtgctgggattaaaggcatgcgccatcaccacctgtctaagaccttatttttacttttatgtacatatgtgtgtgcccatggaggtcagaaaggggagccatattccttggggacagaattctatataggtgactgtgagctgccccatatgggtgctggaaactcagtctgggccctcagcaagagttgaatgcactcttagccaccgagccttctctctggccccatgatccctcctttttaaaaagtcccaccgaagccacatatgcacagcccagtcatttgaaatgtacgtttcaaagctttagtgtattcagatctgtagaacaaccaacaaatcagtgtcaggacctttcagcaccccagagggaaacctcaaagtcctcgctgtcactgtcctctctggagcctggtggcctcacctctgtctctcaggtgtcgtcttctttcttacattcagcatgttccaagggtcactcacagtggagcactggctaggacttccttcttaccgtaaggtgatagtctgtgtgtgagcataccacattttgtctgcccaccctcaaatggaattttgtttgttttctcctttggctcttaggcataatactgttacagacatttgtgtataagtcttcctgtggccaagtattatttatatggatgcagacctaggagtataattactaaattatatgttattctgcatgtaatcattcgaggtactgccagccttttgacatcccctcacatggtgtgtgagttctggtttctctacatcttcacaaacaatgattattatctgtctttaattatagctgtcctagtgggtgtgaggtgatatcataatgtgattttttttaaatttgcatttgcctgacaactgagaacatcctttgatgttcttggtggatatttgcatgtcttcttagagaaatgtctgttccatttaatttcttagagatttattttagttatgtatatgtttgtgggtatgtgagtgccagtgtccttggaagccagaggtgtggatgtcccttgtcactggagctggagttacaggtggttgtgagtcaccagacatgggtactaggaagcaaacctgtgccatctatttagtcccctctttgcccctttaaaaattaactctgtgtgcgtgtaagtaagtaaataaaggaactttagaatctattcaaattggttgtgaaacctaggggacggtggtcttgaggcatctgtcagtttacttctctctatcttagattagctgttgttaaacgtgaggatggctgtgctttctgatttgactgctgaggcagggagtgtggagataaaaccatttcttgaaaagaatgagagataaagttctggttgaacgattcccagcatgagcaggtccctgtgttccattccaggtccttgtggaggaaggggtgggacttgagtgaagccataggaagttgtagccagttaaatagtggctctgggaaagcacccagaggcgggatttgcttctccccatggactataatatacctgctttgtttccagtctctgactgcaaacttggcattctttatgggttctgatggaaaaaacacagtttgctccttagacccccccccccctttttttttttcctgaggagtcacaagatgatttataaattgattgactttcaattcagtcttttctactttggcttcacaaatcctggcctgcttaaagtatcatgcctgccccattcccacccccttttgtggttctgagggttaacagggctcctcccaccactgaaccacatcccaaacaatgcacatcacatgggctgtcaaagtcttcaaccctgacaaatgcctgcagaaaccattcagaaggaggaagaatgcgttttggtttaaagttcccaaccccgccctttagttggacccattgctctgagcctgaggcctgtaagagtatcccagcattgggggcatgtgtctgaagctgctcgcctcagagccaccagggagcagagcagagtaaggagggacccgggatagtgccatagacagcaacctgcttcctccagctagctttctgccaccttcccaaatagcaccacggcctagggaccaagcctttaacttgtgagtctgtaggggaaattacagcttcaaaacctacagagccctctgatgtcttgcaatgtttttgctttcttttatattgctttgctcctctggaattctaaaagcagaaagaagtcaccatatgtgctgggagctggaggtgtgtggtgtggagtgtttgctctttgtagagacagtttcctcttttttatcatgtaatggtggcgtcagaaaatctggaatagaggctttgccccacgttgtttctctctaagttgatgtacattaatacacatgtacattttacatgtggacagtttcgtgagtgtgttaccacagtcaagacatacctatccccttccgaagtatccttgtgcgtatgaatacttaacatgatatatcccataacaaattataaaaatataatctttgtatttattctctgagaactaaaattacgtttctttttgttctgttttacctttttttttcctcggcagtattagagatcaaacctagggtctcccaccttccaccgggctacagcctgagctctttcatagcataggcctaagtgcacagaatgctgtacactggagaggctttatcatgtatagcactgaatgtatatgagttaagtagctccctccccaccccaggcagccatcatcctttgctgtgcgcactacatgtgctcactggcctcgctgctgctttgctcccttggctcattgcacagcagacacatggacaattagacgggcacacacaggctctggagatgagatattttacgttcatttatcgaacactttggtgttcagtttgacttgcaaaatgaaggtttgcttttcctgaaggacaaaggatgtatctcctatgcagctttcccctcactggacttaacgagaagagtttgtattaaaacaannnnnnnnnnnnnnnnnnnnnnnnnnnnnnnnnnnnnnnnnnnnnnnnnnnnnnnnnnnnnnnnnnnnnnnnnnnnnnnnnnnnnnnnnnnnnnnnnnnnnnnnnnnnnnnnnnnnnnnnnnnnnnnnnnnnnnnnnnnnnnnnnnnnnnnnnnnnnnnnnnnnnnnnnnnnnnnnnnnnnnnnnnnnnnnnnnnnnnnnnnnnnnnnnnnnnnnnnnnnnnnnnnnnnnnnnnnnnnnnnnnnnnnnnnnnnnnnnnnnnnnnnnnnnnnnnnnnnnnnnnnnnnnnnnnnnnnnnnnnnnnnnnnnnnnnnnnnnnnnnnnnnnnnnnnnnnnnnnnnnnnnnnnnnnnnnnnnnnnnnnnnnnnnnnnnnnnnnnnnnnnnnnnnnnnnnnnnnnnnnnnnnnnnnnnnnnnnnnnnnnnnnnnnnnnnnnnnnnnnnnnnnnnnnnnnnnnnnnnnnnnnnnnnnnnnnnnnnnnnnnnnnnnnnnnnnnnnnnnnnnnnnnnnnnnnnnnnnnnnnnnnnnnnnnnnnnnnnnnnnnnnnnnnnnnnnnnnnnnnnnnnnnnnnnnnnnnnnnnnnnnnnnnnnnnnnnnnnnnnnnnnnnnnnnnnnnnnnnnnnnnnnnnnnnnnnnnnnnnnnnnnnnnnnnnnnnnnnnnnnnnnnnnnnnnnnnnnnnnnnnnnnnnnnnnnnnnnnnnnnnnnnnnnnnnnnnnnnnnnnnnnnnnnnnnnnnnnnnnnnnnnnnnnnnnnnnnnnnnnnnnnnnnnnnnnnnnnnnnnnnnnnnnnnnnnnnnnnnnnnnnnnnnnnnnnnnnnnnnnnnnnnnnnnnnnnnnnnnnnnnnnnnnnnnnnnnnnnnnnnnnnnnnnnnnnnnnnnnnnnnnnnnnnnnnnnnnnnnnnnnnnnnnnnnnnnnnnnnnnnnnnnnnnnnnnnnnnnnnnnnnnnnnnnnnnnnnnnnnnnnnnnnnnnnnnnnnnnnnnnnnnnnnnnnnnnnnnnnnnnnnnnnnnnnnnnnnnnnnnnnnnnnnnnnnnnnnnnnnnnnnnnnnnnnnnnnnnnnnnnnnnnnnnnnnnnnnnnnnnnnnnnnnnnnnnnnnnnnnnnnnnnnnnnnnnnnnnnnnnnnnnnnnnnnnnnnnnnnnnnnnnnnnnnnnnnnnnnnnnnnnnnnnnnnnnnnnnnnnnnnnnnnnnnnnnnnnnnnnnnnnnnnnnnnnnnnnnnnnnnnnnnnnnnnnnnnnnnnnnnnnnnnnnnnnnnnnnnnnnnnnnnnnnnnnnnnnnnnnnnnnnnnnnnnnnnnnnnnnnnnnnnnnnnnnnnnnnnnnnnnnnnnnnnnnnnnnnnnnnnnnnnnnnnnnnnnnnnnnnnnnnnnnnnnnnnnnnnnnnnnnnnnnnnnnnnnnnnnnnnnnnnnnnnnnnnnnnnnnnnncactggcttacagtctttctagcagataccctgctgcataacagggttatttagcagatctgctttcagtttttttaaatggatttttatgcatggattaaacacattagtgactatctctgagtcaccaataatgcatcggtattgaatgaaggaaagaatgttcccttggtgtgatttaaccaagaatggtccagatttgaattctctatgttccccgagtcttctgtcctctcttgtgtgatgtgaatctgtgcctgcctgaaagctgtcttgttaatatgtccctgtgtctgtgtcttctgagtctgtcagttgtatgagctgcgtggctatgcttaaacaaaggacttcattctgtgtttcttcaacagcacagaaagcatcacgtgggaaggaatggggtactttacagaaatcttcaacagagttttacaaggaattacatcactggctccatctgatggagactctaaacacttctagaaacattgttgagcaatcagtatccatgcatattgcactcaacctttttggtagattttagataattgctttcagtctctgttcttgctgcattcagcaaatgatgcacatgcattgttctgagacaggggcatggactagtatgtaatttaagattgcagctatgcattagtttagattgtaaaagctgattacatgaaaagcccaaggcaagtgagatggctattacattgttctcttaaaggcaggctacacagatagagcatagtaggctagccctcaagacataagtgaactcaggtgtgttgttaattctggctacacagtcgagaaagagtcgcagactcttaaaatacaagagatattttcaggatcttgggatggttttgtttgttgtttttgttgttgagacagtcttacagtgcagccttggatggcctggaactcggagatcttcctgcctctgctctctggagtgctaggattaaagacgttactttgctatcaagggaaggcagtttttagtttactgcagaaactccactgggtttcattataacaactggttcacctccctacggtgtaggcaggtaaggctttcctcttgtctatatcctcccaaacttttgaatttaattttatttttgtcagaatgcaaatatttttaggttgtacatagtagtcacttttccctgtcgagaagtaaaaaagacacctttaactacgtgcttgagcaagctaccaaggaaataaattgaagatcaaaggtccctgggtgagcgggtaatttaaattgttcaacagtatctgctcacagatttatgatagagaaatttgattgaatgagagaagcaaagaaaagtacattttgattacaaacctaaaagggaaattaacaccgtcttcagctgtgggagtgtgcctacttccttatttctttatttactgtgttcttgtaccctgtgaactgggaacaaaatcttaatctattttaatacatttttttgcgctcaatattgtctgccccccttctttagtgtatctttgtgtgtctgtatgtgtgtagggtagctagtgtaggtacgtgtgtctctggctgtgtgggcatggaggactgccctgggtggtgttcctctgacattttctacccctttcctttcttttttgggggaagagtgggggtgggggtaggtggacacatagtttttctttcacagggcagtagcttacggagtaggcaaggctggctgcccagtgagccccaaggagctgcctgtctctgcggtctcagcactgtgccacagatacgcaccactacgcctggccttcatttaaaacgtgggttccgggacttgaactcagatccctgtacttgtactgtaggtactttcccaactacagtgtctgcccggcctttgctctcttttcctagactttgtctttcccctttctctttgtaccttctctgcgtctgtggacagagcagctgcatttcctgaacaggtgttggcttctcggtctgtcaggggcttgtgtgatagtgttttgtgctgacagggcacttgtgatttgctgcagctgcaggtcccaagaatctttgatgataacataaagatctaacagattagaactactgttcgtgggttggaaatgtagctcagttggtaaagtgcccggcataaagtgaccgggtactaaaatgtagtctcaggctgagggtgagggcagaagttcaaggtcatcttcaggcacatatcgagtttaaagctaacctggactatatgagatcctgccttgacacccaactctgttcttggacagactggcaggagggatttggtggcctggtcagcttcccatgctcccgtgctcccacactcccatgctcccgtgctccctcgtgattacgttttgatgactctgttgtcctcttgtcttctagccgcttcctgagaagtttgtggtgaagggtgttgtggatcgcttctcagaagagtttgtggagaccagaagaaaagcgctggacaaattcctaaaaaggattacagatcaccccgtgctctctttcaatgaacacttcaatgtgttcctcactgctaaggtacaggcaggattttgtgtgtgtccctctaaatgctcgttctcaggctcctcgaacactgctttgctcttccacgagccacttccacttgtggtcccctgagctggacatcacaaaggccttctactttcctggtgcccgttgcattggcacagtttcttttagaatctggcaggataataggctgcacccccctttgcagcagcaatgaaagtcaatgttctcacttaccaaaagcagaagtgcccattaaacacttcttggcagtgttagtaggttggcaggcttaccaacaataggcacaaaagagaaagcattccgagtgtttggtaagagtgttcttcagggctggcaagatggttcagtgggtcaggtattcactacaaagacctaaggagccaagtgttctcttcagggcccatgtaaatgtgaaaagactcagttctacaaggttgatctctgacctccacatgccagatacttatacaccaaggtgtgcacaaaggtccttgcacccacagagtaccagggaaccaggaatattaaacacaaagagtcctctcctcaaaagaggaattagctgtttttcagccagaagactgggagtggacattgttaaccatctggtgactttttttttttttctgtctgtagaggtagacctcacccaccttttgctgtagagacagacctcacccaaatcacccaaaaatgtttatcccaccagactgttaatctttagttcccagttaatagaacccattcttaggggggctgtcacatgtgctttctggcctctgtgctgggttggtcagagagcacagcagattctaagccttctaacgacagaacccacccaccgtcatggcactcggactttttaaacagtgtctgtgtagtcacgccttaagctttattgtgtacctggaattggagtgactttcctggaaacgttttcccaaactgtactgtgttttaaatgtgccaataacgaatgacctggcatcagactccccaggtttgatctaggttgatgacgtcagcctgagcagaggttgttgtttttttttttttcttcactttaaattcatttaatcttcccactcacttacatttacttcgttgttattcattaaggcatagattttgttcaagaaaccagtaggaattcccagcaccacactggcaaagccagcctccttatcaagtggattttgatggagccgagtttttattcttacctgttcacagtcacttccctgtctgagcacctgcggagtggcactcaagaaccttgaaagtaaccagcttcatttttcaggcaaggaaactgaagttcagagagattaaacgtgttcagtcaacatcactaggacttgaagtcgggtcctgtggctcgtaaggcccctctttctagctcacaaggcctggccattgcttgctgacaactcggttcctctgttccagtcatttgccagaaaagcagttgccttccagtgtgttcctagactgttcaagctcaggttgcttgttcactggctttgtgcttcacttgctgttggcagaactggcctgaaatctaaggcagtccactcatactgtgcagaaatggggtcacatgctcagactcgcaggcactcagcttctcccaagccaacccattcagttcagatctgtgcatcaagccatatataatgacaaaggtttgaagtttaggttttgggtttttggtttgggttttttttttggggggggggtgttaaaatgacaagaaaacagagacatgtgtacagatagcagctgctgacatttaaggctcccagaagattctgttctctactcatggaaactacctggcaaagtccagtttttgtttttagcttcagtcggtggctgcccatgcactagcccccccctacaggttgaacctgtttaaatgtaagcatttctcagcatactgatgcttgggtgtggttcttccagtttcttgttttcccaaagtgaaggttggctctgaggttgcaggtcctttgttccgaagccccaggccatcctcattactgatgaagtaggagagggctgtggcttggattcctggtcattaggactctgcatgaagagtcagtgggagcttgtgtgtatcttggagagagatgaattgagacttctgggctaaacagtgtgacaaagattttatttaaagatgagtaataaggtccttcagtgtctccatcaaaatccagttttgggctagagagattgctcagtggttaagagcatcaactgcttttctggaggtcctgagttcaaatcccagcaatcacatgatggctcacaaccatccataatgagatctaatgccctcttctgatgtgtctgaagacagctacagtgtactcacatataataaataaataaatcttaaaaaaaaatccagtttcatgcaaggaagtacaagcgagcagcccttaaatcaatgtcttctacttgggcttgggctggtgaacatgtttaatcctagcatgtggaaggtggaggcaggaggatcaggaattcatcctcagctctgtagtgaagtgagggccagcctgagctccgtgaatccctgtctgaaggagcagagctttctgtgcttagagagtggagacgctacactcagagacagcagctctttctccctactaactctcctgtgttcgcctttaacatactgtcgcgtaaacttccctgcagggagatgtcaagaaacatctattatttcccaagacagaagacctatgacagaacaatataatgattcctccagagctaagacagtggaggtgttgggttttatctacagccccccagggaaggggttactcacaggagcatgtgtgactgaaacagcctcacagctgtctcaccccagtgcaggccatgccttccctgtagttgtgccgatgagcctccccatcagcttctgtgctgtgtgtaagctcactccaactacaaaggagagctacgtacagatgtcaaggaagtagaggaaggaacggatagtgtctcaggtaagggtctgatgatcttcctcctatgaggagcaacaggcctgatcttgacaagggtcccttgggtagtcacagctgctagattcaggcactaggctgggaagggaagtgttttatagtgtgcactgaggccaagatcttagatgaagcacttctgtgcagcatttataagacagccctcttggtgatagcatgccctcatcccaaactagacatgtccccaagaagaagccagtggtgctgggagactcatgggaagtgatgggagcaggaggcttgttcccctgacaggctgtatacacttttggttgttgctgttttgagatagggtctgtggtggttggaataaaagaatgcctcccctctccaatgcgttcatacatttgaatgcttagtcatcagaaaatggcactatttgaaaaggattgggaggtgtggccttgttggaggaagtgtttcatgtgggctttgacatttcaaaagcccataccaggcccagtgtctgtcagtatatttgtctcccaaccagtggatcacgatcaggatctgtctgtctgtctgtctgtctgtcttttccagtggatcaggatgtagctcttggctgcttcttcagcaccatgcatgtcactgtgctccctactatgacaatactggtctacacctcagaaactgcaagcaagccccagttgaaagccttcttttgtaagagttgctttggtcctggtgtctcgtcacagcagcagagcagtggtgatggcaggcctcactctgtagcccatgctagcttgagcgcccgctccttatttctcagcccccactgctggaatgatccataggcaccaccggctcagccctaagagctgtttgcttgtttgtttggtgggttagcttgaggcacagagtcttactgtgtagaccaggctggccttgaactcacagagattcactacctctacctcgtgagtgtagttaatgccaattgtaacctcgtggttttccagccatccagaaatggtgactctgagacatatttcatgaataaatacctaagccaaagctttgcttgttcccggactacctcttagcttaattgcttatttactctattctaagccatgccatgtggctggctacctggtcttcagtttcccgtggctgtcttctgtgtctggggcaaatcttttcacgtctgattctattcccagaaatcctctctgtgtactggaactcgcagctccctgtttcctgcctaatctagcaggccataggcttttgtattgacaggtggatgcttccacacatagaacaaaggttccctctacacctcagtgctggaaccaatggtgtgagccaccatgctgggtgctttatcttttaaaattcagacacaagaggtttaaaggcccaacccatttcccattttttgcctttacccacaggaaattctgatttcaaaagtgtctgcagtgtcagtccctgcagtgagttttctagcagcgcttctgtgacttctcagctcccgcccctccacctccttctgtggctctagttgggtttgagtgaggaatgagatgaccctcggacatttaattttgtcctaaagacagtacaggatctgtcagaggtttttaaaaaattgtgttaggaagaatgttgttgcatttaaagatgggggaatatttggttctcaaccttcctagtgctgggacctttaatacaggcctcccccagtcaaaactaccttcgctgcttcttcataacagtaattttgctgctgttatgacttactatgtaaatacctggtatgcagggccctgtctagaggttatgacttattatgtaaatacctggtatgcagggcccctgtctggaggtcatttgacacacctccaagggctcataagccataggttgagagccactggactggagggtctggagcccagccatgctgacagggaatctgggcatgagcttgtggctgtgagtctggagcagtctactgtagaatgctctccttcaagccaccgtgtggtcacagtagctgtgaattttaagagtggggcctggtggctcctgataatccatcataggaggatgggtatgtgtgctaggtggggctttgttgggccctcacttcatctcagccactcccccttttacttcacagatagctgtatataattcttcctaattgcgtgtggccttatggccttgggagatgctagtgtatatagactctagacattagccgaggagagattccatctttgcagctttggggaagtcatcatccaggctagggtgaggctttcttgtggcatggctcctcaatttggactttagacttgtattttgggttgtcctatatgggtaggcagatgtttgtttggcctccacaggatgagagttcccacagtggggctacgatgtgtacatggccctcacaactcctgctttctagttcttcatttccaatgagacactgactttagaagctggttcccttagccctggctgtctgactgaggttgtgttgttgtctgcaggacctgaatgcctacaagaagcaagggatagcattgctgagcagagtgggtgagtcagtcaagcacgtcaccggaggctataagctgaggagtcggcctctggagtttgcggccatcagcgactacttagacacttttgcactcaaactgggaaccattgatcggatagcccagcggatcatcaaggaagaaataggtgagctctttgttgagattggtggtgcccagagtggcaggaatggcgttcattttgctgtgctgaagcaacctgcagacattctgcagtgacagaaccaggccttattctgcttaaaaaccagatacaagggggaggggctggtggtgcctggaatgcgttttgcactcagcccttgtcactttgcactcagtccttgcagtcagcgtggtgtttgctgttcccatgcctcatccatggggctgatgattacagaaataaacgtagctgagagatggctcaaaagaagagtgtggtgcccgctcttgccaaggttatgacccagtgagcttttgaacttagcatctgctcctccctgccccgcatcgcttcatatcctctcctctgtccttgtcaccactgcctgtctgcctcctcctgtcatggtctcttacttaactttgtccctttccacaggtgtgggcagacacctgaacaatgtaatagccatgctgaaacttgatgcacatcacacaggcctgttcagttaaacaacagcggccatgttctgtcaaatgacaggaaccctgagacaaatggaggactgggtttactcttgtaggggtgaagaaataaattttttttcttattccctgaaaccactgatagaaccattgagcaagggagcgagttgcctctatgagaccacatctctttcagcagattgttcccataattccattgtttttccattgtgactgatttttttccatttaaaaaaaaaaacccaccctcaagtactagagatataactcaggttaagaacacttgttgctcttgaagaggactcaaattcagttcctagcacctgcattgtggctcacaaccatctataactcaagttccaggggctccctcattgctttgcaaagcatttcacttgcagtattatgagtgggggtaattatttttgaagaagtttgttggatttggctcttaaccatcttctcccataaggtattttggttcctagtaacaagagtcccagatttgtatgctagcaataatttatattagcttttaggtattaagaaaatgttgggaatatattacacttaaaggggagtgtgtccaggaaagacaaaagccaaggctgtgtgtcctaatgtagggaggtctgggctgtggatccggagtcagtcacaccagtgggtgctcccctgccagattccaattcctctcttcctctagagtacctggtagagctgagggagtacgggcctgtgtattccacctggagcgccttggaaggcgagctggccgagcccctggagggagtgtcagcctgcattgggaactgctccacagccttggaagagctgacagatgacataacagaagagtttctgccagtgctcagggaatacgttctgtactctgactccatgaaggtaagctggcttgctttttgcacactcaccaagagcctgtggattattgcctgtttgcatgtggtatacatccctttgtagttgagaagactaccaaggtcatataaatagaacatgtggtgaacagagggtgtgaattaagtggaagaacaggttagaagaaatgttctcaatgttcttatactgggaaaataaaatagctcctaatcaggagtggacactgtggaggaaggatggtcagataactttgagaattaaaaacacaatttgttggggctggagggatggctcagtggttaagagcactggctgccctttcagaggatttgacttcaattcccagcacctacatggtggctctcaattgttgtaggtcctgtccccagaatccttttctagcctcctcagcccactggccttacatgctgcacagacataagtgggaaaagcacccatatgcctacaaacttagtttaaaggtatatgattggaaagtgcagtttgaggaaatcttagaaagtaagaccaaaaaaggaagttgtttgatggtgagatacaactgcaaacatgtaaaactgtttgggtggggacattatatgttttatctcaaggttcctgagaattcctaatttagagaacaggaaaaccacgggagggaaactgaggaagagataacttaagggagaatgagggcatgtatgaaaggcagaagagcaaaaaaagctttggctcagtggcaatcgagagcacagcgatctgaatacagcatcaggatggaaggttctcatgcccacgcggtggctcccagagactgcctgagaacgcagtttcagggggcacccggcagagaaaggatctgtctttcaaaagttcgggaggctgtgtgttgaaagcccacttccaagcaacccccttcaggttgccaaggatggccccagctctgatcctcctacttacaagcagatacatactgtactaactacaattgacaatttttttaatagaggctgaaaatccaaaacttctggcctcaaacctgttgcttttttacaatagatatagataggtagatgaaaggaagaatttctttttctattttattttattttattttattttattttattttattttattttatttgaaaaggaagaatttctaatgtgtggctgaagtaagacctcccgaaattaggaaatgaaccaaaatgttttcactttgcttacaaggttcacagtgcttgcttttgtaaacaaaaagtaacttttccaatcccgggtgtttgggtggatttgactctcgtgcacacaccgcctttatcaggatgctccccaaccttgctcagacagaatccaatacgtgcacagttttagggattttctattctagcatgtggtaaatatgttaatactcaatatacatttgtggttagagcagggttttacattgctgttaagcaaagatttatctggtgtcttaattagagcatggactgcagtgtgaggcatgaggttgccagagcaactgagacacagcaaggaagtagtgggttgttcctcttcttcaccccatgtgtgaagcactgtactaagtttcttaatcattgatccctgaaatactgcagtcaggttagtggggcaggaaggaggatttactacagtgtcgaggggaaggcatggggaagaggaagggttgattggcagcctctgaggctggagctctggcccagtgccggctgaggtaaataagtaaaggagaagacggctcagggatgcgcagggtgaggccacggcagagccagcattgacctaaggttgttgagatccaaggtgctcggataagatttgcagacagtgatgcatgtcttcattggttcccttgaatattcatgctgcctaaaaagtctgtttccacattttacttccctaagagagttcttttcaaaaaagctttctgatcttttattttgagacgagatctctgtgtgtagccctggctggccaggaactctgtgtacagaccaggctgaccctgaattctcagagatcctcctgcttctgccttctaaagtgcaggattaaaggtgtacactaccatgcttggcgaacattctggtgttctatatttgtgtgagaggctttggagtttgctaggaaaagggaaattgagagtgggtttactggaggcctggatgagatcgtttgctgcaagtgctgggtggcctgcaggattaagcaggtcccactgactttgcttccagggtagttattggtgctagctttggatggaccagagggagtctttgaggaaacctctttctcttcccaccatttgtgagctccctgccacaccattggaaggcatgggcttgagcttgggggcgtgtagtgtgatctctgctgtataccctcaactgtggtattttcttggaaaaaaatccagtgttgatgttggaagtcaaagcacggaatgtgcctgtgcctcctccgggtcactccgtcatggtaggcagaaggctgcttgccacaaacctgacacagttgacaattctaagtctcctgttgctactgttggtttattgaaagcgttttggatgacaggcattatgtttgtattgtttgatgattctttgtagaaaatttccaacatgtccagagaggatgggggcgagggtagcagaaacaggagggttgctggggtttgcagagggagagacacagaagatttaaaaaaccagtttcttaaactatggtcacatatttagtagtactcaaattgtctcacataatttttatagttctttcccccaaatccatcagaatccatatatttattgataggtttcttaaatattttataatttctttccatttttaaaaattgttttcctcaacattttcttgttaaaagtgagcattaagctgagtcattagcttcttttcatcttcacagcacactagtgacgtttcagatttttagggccagttaaagtcatgctgaagtgctccacttctggacatgctatccaagacaagctcattctgtctcgaattaaattcaccctgtccccaaatccccagtccttctcacatttggtgacacatggtgacacttcacgctgccttcaatactgttttcttgtttgttgtctgcccctcctcctctggcatggaagctctaccgaggcaaagctgtcttgtttgttctctgcctctaaattgatgaatcaggatacccaaaaggcagaagcaggggaggaaaactagtgacatggagagaggctcaggtggcaggaggggaactctgtagatagagcctcttggctttcaccccattatatagggtcaaccctttctgtcataagctggtttggccagctgtacccacagatactgttatgagagtggggagccatctttaacgtggccagcagtgtatagagcggtccctagagaagatgcctaatcttcagcatggttgggttatggtcagactgtgaaactttagtcagaagatggtggaaactgagttgctgctgtcctaccatccagcagtgtggcctcagacaggtcctatattgtcaccatgccaagtgtcctaatttagacagtaggttctatgtccttcacctccaccagggtgttggcagccttttatgctgcccagtgattctgggatgtaagcccaggtccttccacatgcctgctcatggagacaacattccactcgctccaggagagctggggtgacacaagctcagacagaagagccgcccagaccaagtggaaagcgaggcatgacatcatccgaggtcctcttgctctccttgtgggatggcatgagtagatggatgatggtaaccatcccaagtgatgcatcttctcccacatccccccttcaggagtctcagcatcctcagccaagtgatactgtaagaaacgggagagaaaaccacacactgggctgacagtcccaaggcatcgtctcaagaatgctggttctgagattcctgtcacaccaacaggggcatgtctgtgcagcgtcattcctggagtgctagactgaaaatgatgtcttttccagtaagatgtgcagcgttctgtgaagggggtgtgtatacacagacagacagacagacagacagacagacagacggccattatcatcatgtgtttatttctcttgggtggagatgatgatgtcagtattcctggtaccagaccagtagttttaggttatagcctatgctttgtgaaatcagaaatgacccatggtttttgttattttcctttatagatttacctagtctaatgtggtacccactggccataaaaagacttatttaactttaaatttaaataaataaataaaacacacacacacacacacacacacacacacacatccatttcctcagtcacacgagctacatgtcaggtacttgataggcagatggggcttgtgacagctgtgttagagcatgtttctgtcaccacagaaagctctgttggtgactgtgtggagcacttaggagaaagtaaatgggaggtgaatgatggcagggtctaatgtgcagaagacttcagttgccgtcccagtgatgagttcctttagaagatgggccttgagggcccttggctgttcagtcacccagcactcctgagtgtcagcagggacaccaagtgcctaacacttagtgccccaggcatggggccttcctgccctctctccatgctgttaggaggacctgtcttggtaacctgtggcttcagaggcagtgggtagaaaggctctcactatgttccttgctggccatttttcaatgtactgtaaggttgaggggagaacagagctgtgcttcttcaactgcaagctttttgcctggccctgagggtctgcatagcagtgctgaggccgaggggaggaaagggaagctggtgcgcaggctcaaggggatgttccctctctggtgctgcctgctagcatggacagaacagtgaacgtgaccttatgcctgtcacctgagctcctggctcgcctcatctctgtctatcccaggctggatgtcactgggcccatctgcccctcctccttgcaagcttgctatatgaatcgaggggctcagacgcatcactcagaactcttgtacacacatcctcttccatatccggatctctctcagactgaaccgttgcatagggactgagtctcccgcatcctttacctggctcagaatagagaacaaacaatgggcagatcagtctaccaggcatcagctaacagatgagagtctcaagaactctcttataatcgttctatagcatagtgagggtagctgattagtgtattcatgaaaattgctgaggagagatttaaatgccttcaccacaaaaaaataagtatgaggtaatgtctcttaattagctcaatttagccatactataataggcatgtattttggaatactttatgcagagtaaatatgtatgatttttgtcaattatataagttaataataataattaagaactgtctttgctaagagttttccactgaacccagagtagccctgcattttaagcataaagcttagcgtctgcccgaggtctttgaacgtggtgaagatgaggcccccagcagtgtggcagtggtgccaatcttcctgacttgcccttttcaaaattgttgctgtcaacatctggcgggttactccccggcaagcccaccctccagagttggctctccttccttccctcctgtcctcagagctggtgtggtatgcgcatggtgttatggttcagggcactgtgatttggggaggacttggggatgaagactggtacatgcttctctctacctcccacagggtgtattgaagaagagggaccaagttcaagcagagtacgaagccaaactggaagctgtggctctgaggaaggaagagcgtcccaaggtcaggagaacacccagccgagggtgggccaagctgcaggctccctgcggctgctgccttgtccttagatggaaggatagaatctgttctatctattggttattctgtttcttacttgttcgtgatccaaagttgtatttctgttcacagagaggatgggaatagggaatgttattaagaagaaaatggtaaagaccaatgttcgggccaataattggatgttagaactgtcactcacctgtcctctccttcctggaacagacttgggaaatgtaaaacccagaccagacctcagagataacactccttccctttgtttatgctttttaaaaaatttagttgcctcacatgatactgtgctagtcatctgggactcagagggggtggagaagtgagtcacagaggagctctggggattgcctggtctttcggggtgcagatgtgtctgtatccagtatgccgtaatagcaggtggatgcaagtctgctacgttgattcgtgtgttaccatggatccacactagaatttgaaagctgcctgcatcttacatgaatctctggtcttgctctgagaaggaaataggtaggggtttacatgttagtgcatgtaaatgccctatctgtcctgcccacaaaaagaactcaagaatatatatttgtaatgtatttcaagaggacttaggataccaccctgcactgcaatacacaaaacagagtttgaacactgaacaaataagcaaacagcaagaaccctgggtgccgtacagaccactacatccgacatggaggagcctgtgtgagcactgtagcttgtcctccattcagacattttttgccacctgaggcctaacaggtggtccaatcccccaatcttttgtaccttgggatagacagcactcatccattatccttggatattgccatcccaatgtcagtcagacacaggaacacatgactgcctcggtcacagaacaagagtattgaaacaaggaggaaatccaggtgttccttgtcagttaatcgtcataaaaacccacaagcaagaaacagtcacagtgtctgtcagctacttgcaagcctgagcgcccagctgtcagcagtcctggcatccataagttgggcaacttcacaaggaaaggtgccgagtccttcagccctgtccacgccatgttgacattgctctggttggtagatagtgactcaaactcctgtagcttggggacatttgggctcagtggtctggggacttaaaactttcaaggtttaagcaccatttgcctctggcacggaacacttgagctatgacagaaaacctggcttaggagaaccagcatgaccaggagaccctccctagccatgtgagatgaatgtaccttaccacagcaaagggacggtcacaaaactcagggacacatgtcctttctaaaccataagaaaaacctgaagccacttgctatattatgcttcaaaactttaatacccttcagggattttttttcctttgttcttgagctctgtggttaactgccacccagagtgcagaatggtgccccgtttatgtgtgatggggagttcagaggacctggctggtaaactccttattcaattcactcagataaataaggtaaggtgttatcagacatcataagtattgggctagctcatgtgaccagaacaggaaccccttctcctctagttctgacacaaggcgacactgtgcccagggctgtttgtcagcatggctgagtaaatcctaaaggggctccacaccgccttactctgacacgaaggaatggttcccccatgtgtctgctctgctcggttgggtcagatgattcttggggcaggacagtgccttttacaaacccttccagggcctgctttccagggagcctctgacattctaattgagaacagtgtttgtggaggaggagaacccagtcacactttggagccaaggatatgtcttccttccaggtgccagcagatgtggagaagtgccaggataggatggagtgcttcaacgctgacctgaaggctgatatggagaggtggcagagcaacaagcggcacgacttccggcagctgctcgtgggcttggctgacaagaatatccagtattatgagaaggtgaacacatgccactgtgcttcccaggagctacggcctttcacgggcattgccttacttagggatttactgctgtgagcagacaccacgaccagggcaactcttataaggacaacatgtaattggggctggcttaccagttcagaggttcagtccattatcatcaaggcgggaacatggcagtgtccaggcaggcgtggtgcaggagctaagagttctgtacttcatctgaaggctgctaggggaagactggcttccaggcagctaggatgagggtcttaaagcccatatccacagtgacacacctactccaacaaggccacacctccaaatagtgccactccctgagctaagcatatacaaactaccaccggtgtcttccagatcccccacgtcccatccctaacctgcctcatgtgagctaccccagttccctggcagactgtgctgagtttcaaagctcagacacccactctcctaggcctcctcctgctggaggaagtggctctgtgactgggcagctgcttcccggtgataccagcatgtgggcacccccagttaatggagcctttggggttacttcatgttaccttgtggttttacataaaggtgtcttcactctcactatgctgtgggcccctccagtcatctgttgaagctgacaaacatcagacacaccagaagaaggaattaggtcccattacagatggttgtgagtcaccatgagctgaactcaggacctctagaagcagtcaggtgctctgaactgctgagtcatttccccagaccacactaatacttgttgttaatgttgaactttaaaacattctttgtggacctcagagttagcattcccattaacacacacacacacacacacacacacaaggagaggataaaagagccaactcctaaaatcaaggtccattccttatgtatctaatttggagtcatttctagcaataagtcctgatgtccttttgtagcctaaacttacagttaagcaatggcccagttttagttgaaatagcttggccttgaaattcagctgttgggaacagaacagaaccctgtaggacgatgctagagataggcctctctcctagattgtggccctaggactgttgagctaaatctccaatcccaataagcccaaataagtacaaacagcacacaactcagtcataatgtttataagctgcacgcctagattgggcagatctaccactacactgctctcttccccagccatgaaatcccttgctacttgcggttcctccagaccacgtggttctgttccatcttccttccatctcttcttccttgtcctcctctctctcctccatctccttgtctccccctcctcctttaccctctctaaaactcccagccccaccttttccttcctctgctcaatcacgggctctaatctttgtttggcctgttaaaatggggagacgtttcacctgagatcacctcttgtggaagcataattagcatcaaaatacaaactgcaccagggcaatccacacagaacagtccttggcccctgctgtcttgaggcttaggtggttgtggctgctgctctgagcagatgtgcccgcactcggcctggtttactaaagggagctgggggagaaagccgcccactactcttccacaccttttctctggagtccctactacttctgaactggattagctctgtgcttagcagttgccagctcattaaatttaactcttcatcctgccaagcggtgtaggtatcagaggagccctgagtgagccaaagtcctgagtgtatgtgcattgttgacccattccaaggaccccgaagcctccaacccatagatgcatttcatcctatgtgccaggcatgggggacagcaaagctttccttagggtttgagtatgagtgtttgtgaataattgatcagggtgttcgaagactagaactgctgcttcctcctagatgtttgtagcaggagatcttcagatactagcaacccctccccctatgctattcctaataaactcactgaggttccatgttgctggcagtatgagccctcaatcacaatgaacacacaccctcctgatccgagctttgctgtgtgtgtgtctgtgtgtctctcctttctcccttcacgtctagtcaggattgcaggactcaggactccgagggtcacggcaggtagtgtgatagagagaattttatgactgaaaccatcattcacagaagtttaaaaattcctcccaagctgaccagtcttggagtaccaaactaagtatttaactgatggaatcatcagtctggattgtccccacccaaccagcttaggagaacaggggtcatacactgttggcgacaggtagaatgtcctccccatgtgaagtcaaggcctcttctggctggctgtgtgttaggggaggcacctgcgcagcctctctttcttcgtttgtaagtactaatcatctttgcagggtaattgcaaagataaagtacaatgcacatgcaagttaccagaacgtccagcatgtggcagacactcaattacagtttacctccatgctcgtatttgagagtctaaaaccaacgaggtccagtgtctccagcatgcctgttgtggatgaaccaccatctctaaactcccacacttgcatctgtctcttcccattgtagcctgaccttggtgtctccctgtatctgaggttgtttctctgcacatttcatatgcaagggaccaaataacccgctgagcaacagcagactttgccgaaccctgtaggcatcctaagtccatcagagaagcattagtgatagattcccagaggtaaggatggaataagtgtgccaaagggaaggagcaaggaaaaaagtcctcggggccatggagtggtcaggaaagagcagcccgtggagtctcggagcagccttagaacatatactctgggcagagggcacagcacatggaggtccctaagtgaggaaagagcttggcacatttgatgactgaaaagaatgatcagcatgtccctcttgggacaggaaggaaggaaggcaggcaggccggccggctggccggcccttttagctgtgaggggtggccttgagtttagaatgccgtgggcctccctcccagtccgttgctggaagcaagttccacgaggctgactaggctttccttgtttaggacaggcgtccgagtctggcttcctcgccagcctcagagtggacaaggaaggtgtgagggagaggtttcagcactcactcctctttctgcttggccccatgctgcctttctccacccaccctgcagacctccgcccaggtgactcagggtagagttcttcaccctgagcctgtgtgtacagcgggcttgcccttcccttttgcaaaaggtttttcagagggaggacagtgtgtcctgggtcagccactctcaggcagtgcccaagtcttctaagttcttgtcctgtcagaaggatctggaacgagaagagtgtcagtgtgcattcatgttcttgctctaactgtggaccgtgggataatgagtagaaaatacacaacaggatgtaggcctagtaaaacctgattgttggctcagtggggcgggtaaaggtgcttgttgccaagcctgacagcctgtgcttgatcccttgaacccacatggtgggaagagagagctaactccttaaggttgtcctctgacctccacacgcatgtcatggtacatgtgccctcaccctttacatacgcagaaataaatgtaaacattgcagtctttggggatatataaaattgtccaaacaagcaaaccagacttcaggtgagcaagagtgtgctttccacccaccctgacccaggtggctggcctctcgtggctccatccttagacaagccctgcccacacctctaacaatgcctctatcggttctcagagctgccgtcctcatcaagcgtttcctgcctggcctggtttttgcttagtgagagtggatctttccacacattgggtgtaggcttcacactagagtgaaggcatgcaagccttataaggacatgcctctttaataaaggtaggggtgacagattccagacaaacacttgtcacctcccctattgataacagacgtaggcgccactagatagaggtgacctggcaggatgaggattagcagagtaggactcagtagctgaccttgtatgcgtgttctcgttccagtgcctcatggcgtgggagtccattattccactactgcaagagaagcaagagactaagtaggttttggaacagagactcttctgcctccacagggcatggaaccctgaaccagaatgtccctgcagtgccggagaggtcgccgtgggaaaacagcacaacagcacctcttgtgtgtgtactttctacccccgcccccagttgttttcagttagtatttattccttggagtctatgagactgtaatcatctctcagcagcatacctccgtattgtgaaggaacctcttaaatggaacactaaaagacttgaaactaaggggcaagataacccccacatgacacgtgacatcactttggggacagcccagttgccattgtgggacagaaccccagtcctgcgtttcagggacatggggagacatgaagaaggcagctgcagcttgctgtggagaccccgtggctctgcactttacccgtgagggcattaacctgacccagcatggaaggaggtgtgggtaccttctcagaaagtccttaatttacagtggcctgtagcctgtggccgtggccgtggctgtggcctgctgcctgctcatgatgagtggcctctgttgacttgtttctggttcacgtggggccacctgaatccgtgtctgtgagcattgacgcttgagtgagcacgccagcgtccttgtccttatgggatgcctcaggatcttgtttctgacaccagaatgcaacagatgagaagctttttggtgtgaactggaaaaaaaaaaaaaggtgcatttttctccgtgaaggtcttagtgtatgtgttttgcttgttaactgtcatcgtggttgggattagacctgtttggaaacagctgctgtcagtgatgctccggtgtgccaagccccagctccgatgtctgctttgtgcaatttgcctttacctcaccaaaaatgtctagtttaatcttcctgccgtgcccgctgactgtctgggcagccttgcagtgggggctgatgtgctgtcttatttttgctgtcacaatttgtaaactcagtgtgacttctatatgagtgttttaaccctcagcattctgtggtcaggaagataaaagcatctgcaggtccctccaagacgagaagagcaacatcatgctctttgcttctgtctatgtggaaatctccgtttgcagccaaaatctgggggctgccactgtacttaacatcttcatttgaagcctttcagatttccataaagccagcaatcagaaaggatctctcttccataccactgttcttgctaaaaggaagctgcatatttgtgttctttcatctgtggctctttgctaaaaatccgtagatctgagctgcaggtaaacggaaggggcgtcgttgtctttaaggtgaggcggccaagcactgctccgtatataagttaatttgtaaatccggagcagacggcatgctaagtcctgtaattccctctaacattgagtcagatacatcatgggacatcatgggatggcagctagatagcatgaaacaatttatcttctcatatttgacaaatttgtgatagaaataataattcccacatctaccggtacttgcctaaaccctgactgtgccatcccaaaggccttgatgtgaattttctttggtacaaataggaatggcccactgaggcagaggagtaagagtggtccatacacccaaatgccagcaaattggcatctcattctacctctaaaccactgggttggtatgggtatgaatgctcagagctcacccgagcatgctggtagagtcagggtgtgtatttagtcaccaaccggcctccattgtgtgtatcagcaaacaccagactcgctcagaggtgatgtccatctttgagaaacatgaagctttgctttgtggattgtatgcctgatatgatgaatagtcatgtgatgatacatgggaagaactatagaaagaattatccagaagctaagatttgatggccagctggttgccaaaacctcaagtcaatcctgtgtgctggttagttatgcaagaagaaagccccgtagaaacagcctccagctgcactgggagacgtagggagggaagcagggtccacagccattccctcatgagaggtggctctcatggcatcttgcaatgtttgtcttgttttgttcatttggccagtaaggaatgtccctgggctttgagtttccagaaagagatggaataatggagactttctttccctggggaccagtgtcagtggcagagccagggacacccatgcacaaggaggcatgcttgcccttctccttgggatggcagctggtgagctgaggaggctggcctagaggaaaaaaggcagcagacagtgaagaggccttcctccctccctgctccacaggccccctcagtccctgggaaagtatgcacaaaagagactccctacatagctcagagactacagtgccaaaatgccccagagaggctccattacttctggagcctacaaagctgttccctgatgtcacaggtccctccgactcattttccaggagactttgccttgagggtgccacaggtggagagataaagatagcttttgaagcttgaacacatgccagtgagatgaaagttggccttagcaactgcccaggtcctgagaaatggagggcttgttcacggggttagaaacctgcaaaggcagccgggcgtggtggcgcatgcctttaatcccagcactcgggaggcagaggcaagcggatttctgagtttgaggccaacctggtctacaaagtgagttccaggacagccagggctacacagagaaacttcgtctcgcaaaaccaaaaccaaaaccaccaccaacaacaaaaaacaaaagtccaaaaaaccaaaaaacctacaaaggcaaaagaggtttgagagccgtggttgtttaggacagttgtggtttgtagcaggaaaggacactcctgatgttgggaatttgcaagaagaatctgggctgagctgcttcaaacaaggaggctttgctctggagtgaggagggagtgacccctcagcctgtgtagggtccagttttatgctctcggaaggctcagcagtgattgctgccgagtgggaagtagcttctcccagctgttcctcacctcaccagatattttcccaaagccgaaacaagaaaagtcagcatgcctggggctagaagcggaatgtaagatacgtctctatgccaaatggagttgtagaatgtaccctctcagcccataaacaggaggaaaccatatgtgaacactacagcctctggcgagggctctgtggagattttaattttagaagggggcatgatggcagtgtttctcttttaggacaacacccacggaacactcaaaggctgtgtgacttgtcctgtcctgtggcaccgaagccctaggtagctggctgttttgatgaggtcatttgaatcatgggagtgtccttacactacactatcctgagctggttggggtgggtagaagaaggcaaggactgcctgagaggctgcgttgaccctactgatgtgggtcttgggatgggctggaacagggttcctgcctgagtaggtggaactggcaaccttgaagggtgattccccccccccccccgccacccccagaggatcagctgcctgtggttgggacagggcacaccaccttccctcagacggtcttgctaagtatatgactgggagagtttggtcatttttgtgtaccctatggtgggaatgtggggttgcctttcaaaagccttcaggatggcaacagattggatgtgctatctcagtgcctgcaggtctctctgctcgaggcagcagggggcgctttgcagtatagttgaggaaaatgaccgctccttgaccaaactgagatgcacttggtgtgtgggaactgattgcttcctccctgtttataattcagtgaataatcacgggcccaatattttactaacccactctgtaggttgtcagtgttccattttgaaagtgtccccgtggttgtacacttcagaggacagggactctgtgtgtctaagaaggctgggatgagggctctgttacagggcagactgttctctcatagtcttatctgtttgaatattcctgggtatgactttatgtgtggcaaaaacccacattaccaaagtagtttttaactactgtaatttgtaaataagtgttgtggcaggtgggaacctttaaaagatcagtaagatgtttctcatatttatgaacttagcacttgaaaaccaacacactcagaaaaagccacagattgttaaaagcctaattgtagttcgtaacaatttgtcagtacgtactaattgccttattcttcagctagtggtttataaagaggctgcatagaaagttttacacatggaagcagctgatgtagagacttcatataggcagctgcagtcctaaagtctcaagctagagggtgggggccacggaaggaaggcagcctttcaggtagcaagattaaatattgctgttgccaaatagtatttgaaataataccagaaaacggggaccacagtactgttcgatgttttcaagtgagaaagaggaatgtagtatgctttggcatagtttgggagtggagaatacagacattatcagcagtgacaaatcacatagcttcaaaaactcctccagtttgtgacaacatgacaggtgtgacagcatgacaggtttgctctgcttctgcagagtgggccccagaggtcacttaggactgagatgctccaaagtttgaagtgccaaataacatgaaacgtgctctgtcgactcaatattaaagccagggtgaagagttgcaaacccctctgtccctgcagtactgcctgagtgtgtggtgattctgggctctccacaaccagctcaaagcagctagcacccgtgctcactgttgttggacgggctggtccacagcctcagacccatgctctgccgagatactggacgggaggaaggatttttcctagactgcggattggcgtgacaaagcaatggctgtgtcagctgggccttcatccaggaacagaccaacataaaccagcatcttctaccagttagcactgtcctcctggaccatgctgagggttgggcctctccctcagagtcctttctcactgtagttctgtgtgcctgttcccttcatgcctgagtcaggaatacatggagagacagcctacatctgacagactcccacaaaacaaactgccagcaaactttctaactcattttaaccgttcaagcggggaattaaaacaaacttttggactatttttttttaattgttctttatgtttaaaacttgcagagatagaagcaggcttctgaggtacggggtcttgctgtgtgctctctctccgtgctgccgttaagccaaaacaaaagctgtgaacataggtgcttgagagaatgcgtgttgacaggaaagtgactgatttacagacccaagtctttgtctcatgaaactaccaaaaaagaatgtcaccttttttctttgttgtggaaccagagattataaaaaggaaaaaaaaggaaaaaaaaaaagttgtcttgttgtatttttgatgctggcacaaggttcttgtccactttggtttttcttatctctgtatgtaagaaattctgtttgttgtttactatggaattagtattacattttgaggtaaacaaagaatttgtattgcttgataaactattagcttgtaaattaaaatttttttctttacctcagttaacttaagtaatggaccaataaacctatcaaagctgcttcatttcttccggatcatgtgctcatttttgtctctgttaggactggaaaagcagggcatctgccttttgggctttttgaaagtttctctgaacacatggtaattttcttgtgagaatcaaaacacagagcaaccgtaaagacacacgcatgtacacacacaaactttgtattcactctgctataggtcctgacttagtttccttctcctgcatcttataagttggcaaatgaagaaactgctgtagtatcattgtgattgccaggtagatgatacacagagatttcctgcatggaaccatagccaaatgttatattctgggtcagggcagcacctcctgtttggttggttttttttttttttttttctttttctttcttttttttttttttttttttttttcctgttttcaagggttttccaagaaaaggaatgcctacagtttgtgagagcgttagcatttctaagtaagccaccagggctgagaaagaggctcagtgtaaagagctttcttgcactgttttctcagaggacacagtctgaattcagttcccagtccctgtgtcaggcaactcagaacactgtaactctagctccaggggatcccagaacctctgggccttctcatccacactcactcacatatatatgtagttaaaatgaagctggatgtagggtacacacttgttatcccagcacatgggagaaaggtaggcagatctctgagtttgaggccagtcttctcagcatattgagttccaggtcaaccaaggctacatcccctgtcttttccccatacactcaggaaagtattgactgaaagtgatcagttgtgtattccactaaggaagtctgctgggattgctgggaagtctgctggtgggttttgttttctattggtggtgggtgctgttcctgggtttgtttttgctgtttttgaggcaggattctgtgtattcctggctggtctcagaccggccatatagctaagaattgatctttccgcctctaccccccaagtgctgggattacgggtgtgtgcgaccatgcctggcttatgtggtgcggaagattaaacccagggcttcgtgcatgccaggcaagcactccaccaactgagctgcggccccagtcctgatctgtgcttttaaaagcaacaaaggcagcagatatcaccttgacttccagctgaggaatgctcagccaagaaaactcttttttttttcttttttttttctaaagagtttacattaatttaaaaactgttgtcatgcatacaactgtttttagttgtcagtttttacaaaatgtccatttcatgttcattccccttgggttggttaaatttaggctttagtcacagtcttccatagaactagcacgattccatgtgccccattggcgtcttttagacagcaatgagaaaagggggctggctagctggagcccgaagccctccaggatccagaacacctgtgcaagcagctggtacacacagacctcaacctcagcctggcagaggcatctgagaactaggaaatcttctccaacacccagaaagtgattttccctcccaccagggacctgcaggccaaagcaggttattggaagactggagcttgggtttcacaggcagaacctggttatggctggcgttttcagctcctctgtttctctgcacactctccttgttgtgacctcgggacttgtttgtaggccacaacactgtaagaaattgcagaagagagttgtaaaaggctggaatgaggcaaagcaggtgctcccccccctcctcctcacccatgcctgagtcatctcccacccctcttcctcaccaatggagtcactgatgtttgactccatagtgcatcagggtgctactgagtgagaggcttggctctagaggactctccggatgccttccagtcccatgataatgaacttctccctgtctctagtgacatagtgaactagacagctgccccattgtcctagcaactctgcctcgcactcctgcctagtgatgacttcttgtgaatatctcaacagcaagttagcctttactgatgccagagcggcctcgactgcagttagcagttacctctgaggaccttcttgcctacaccccgtccccagcactggggttgcacttgcttttcctgaggtgctgaagacctgactcgtatcatctcgcttacacagcaagcatttaccaactcgtcttcatggtcccaaatcattctccttattgtttagacaggcctcaggaagcctaggctgaggctagcctggaactcctgatcctcctgccttcaccctctgagagctggggtgacagagaaggcccagcatgtctggtttatggtgtgctgggaattgaactcagagcttcatgcttgctaggtgagtgttctaacaactgagctatagtgccagtctcaggtgccacgcctttttgacaaagcatttattcattaaacaaatctttctagaatagttcttaggtgctgggctctcgttgaacacagtggacacatgggagccacacagctgtggcctctgtcctcggcaagcctacaatctagcgggaagcatattaaacattaacacggtggtcaccagctagtgtgctctgaaggaaaactacaggagcttaagcaggactcagattagagcaaggtaaaaggaggagctttgttttctcatctgtaaagtggggataaataatagtcacttcgatggaatccttatgaatcatcatatataaaatatctaacacttttgttagtaccattttttttttaaagtctaggatggagatgggatagggattcacctaagtgtgcaggttggagaagatgaagtcattctcttttggtcgattatattttctctgtgcaatacagagcatccatgagtacctgtgtgcttgtgtgtgtgtgtgcgtggtgtatggggtggggtggggaaacaggctgtggcagcagcagagcctcacaaatacttccttagcatctcccttttcacgtaaagaagagcaggaagggaagacaggactcccacagtgactgtgacaatgcctgccttttgttatagggactaggcggggccagcatgcacacactcgaaaacacacacacacacacacacacacacacacacacacacacacacacacaccatttatggacagccctggcctcaggacctttgctggcatcaaggagaatgcagacgacaactggtccagccttctgactttcttggccgcctctgctttgccccacctccctgggactctctgtgattggaatgtagcttttccctctgtgaccaaaaaccacacaggtctttcctgttgcttttacttaatgactgatgacacagcttggcaacctccagctggaagagattttcagattcttattgagcgaccttggggaaggggaaggtcatagaaacactgctgccacgccatccgtgttcaatcttccttgtacattcaaatgacctgcggagctttaaagtaatgtctagcccagatcagttgagtcctagtctgtgagacctgagagcagtcattctgaaatcttccctgtccatgcaatgtatagagaatgtgtttgtctgcacatgtctctctgctgcagaagggagggggcggaaacacatagcaggtaggtgcctgagccacaggagcatcagctgctcactcggatgtttccagagcctcttcctgcttctgggacaaaaaaaatcatgaaggccctgtgtggccagttgagatttggtgtagggctggtaagatggttctacaggcaaggaagcttccagagcgcctgagtgtgattcccagcatccatgtcagaggctgacaaccacctataactccagttccgagggacccaacacctctggcctccaagggcactcagacacacatggcctctctctctctctctctctctctctctctctctctctctctcacacacacacacacacacaataagtaaataaatgcaccaagcctgatgacctgaattaagtttcagagcctacatggtatcatggtataaggagaggttgaactcccgcacacacatacatgcacacacacacacgcacacacacacagagtaaatgtaaaaaaaaaaaaattaaaaggaactggtgcagaagaaaatggctggatccaagtgcattgggtgaagggtcagggctgttccatgctctctcaaccctgttattgaagaaggcaagccagcctgcttagcacaacccatgtgaaactgggaaggatccagtcattgcatttgttggtctgtttataacctgatgacctacattggctagttagacttgtttcctactattgtttctgggtgtttatttgggttagaaaggctgtgtcaaccttcagtgaaatgggattggctacttggatgaaattattaatccattgcaaagctgaccagggaattggaactcctcaaaaatctatactgtatgctagctagctctcaccaaattagtccaacccatgcagccacgatccaatggaaaggtctaaaggatggacagtcctggacagtcctggacagtcctggctcagtcccctcatcttaagacatgagacttggccatggtcctctgcttggctaaatatccccacctgtttgctttttgtgtcttatttttctcacctaacaaagcgaacagccttaccaactgatggctcctatcactggaggcctggcagagaactagatattatgatatagtgtgaggattcaaaaaaatggctttggcctggagagatggctcagtggttaagagcactgacctctcttctgagaggtcctgagttcaattcctagcaaccacatggtggcccacaaccatctataatgggatctgaagtcctattctggtgtgtctgaagacagctacagtgtatccatatgaataaaataaagaaagaaagaaagaaagaaagtctttaaaaaaacccagcttcatcaagtctgccttcaactatttattatctactctgctgtcaacaatcagccattcctaatactaataaatataatactaatgctgatatctaatactaatatgggaacctcaaagagtgagactgtgtcaaatccattgtaccctagggcatattctgtggctgtcctgaaagatacatttctcttattgctagcccccactggtacatgagagagcttcaattcagggcagtggtatttacatgtagataccaaacacttaaaatgtgcctacaaaatggaatttacacacataacattatataactggatctcaaagatttggtcattttaaaaagtaaagcattcttgggtggagagatggctcagtggttaagagcactgactgctcttccagaggtcctgagttcaattcccagcaaccacatggtggctcacaaccatctgtaatggggcatctgatgccctcttctggtgtgtctgaagacagcgatagtgtactcacatacacgaaataactcacatacatgaaataaataaatcttttttaaaaagagagtaaagcatttctattgcctgattgtgtgtgctgggtagttacgtgctggaatatttgtgtaccagctatattaagctatattattataattagtttcaccatctttttttttctttttgaagacaggatcccatacgatctaggcataactcaaactcattgtgtggctcaggatggcgttgaacttttgatccccctgcctccacctcctgagtcc

SEQ ID NO: 851 - DNA, 3498 bp, Mus musculus
gtgggcggcgtggcgctgctagcagggcgcagggtcggaggtgctggggtttggcgcggcttagcccacggagctgtggtgtaacgctcgggaaagctcagcctcgcgggcaggagaagcatcgggcggaggctgccaccaccagctagtgcagggcctcgggccgagtggggcggagagctgcgggagtaagcggcggcccgggtcccgagcgctgcgcgccatggcgggcgggccccccaaggccctgccgtccacggggccccagtccttgcgcgacatgccgcacccgctagccggctccagcagcgaggaggccgtgggaggcgacagcacgcccagcccggacctactgatggcccgcagcttcggtgacaagctggcagaggttgaggagaagatagaccagttacatcaagaacaagcttttgctgacttttacatgttctcagaacttcttactgactacattcgtctcattgctgcagtgaaaggtgtgtttgaccatcggatgaagtgctggcagaaatgggaagatgctcaaattaccttgctcaaaaaacgtgaaactgaggcaaaaatgatggttgctaacaaaccagataaaattcaacaagctaaaaacgagataagagagtgggaggcgaaagtacaacaaggagagagagattttgagcagatctctaaaacaattcgaaaagaagtgggaagatttgagaaagaacgagtgaaagattttaaagctgatatcatcaagtacttggaatcattagatctcatcttgcccaacggtggtactccagcaggcactgccagcccagcttcttcatcttcccttctgaacagacttcagcttgatgatgacattgatggtgaagccagagatctctttgtcacagttgatgatcctaagaagcacgtctgcacaatggagacctacatcacatacaggatcaccaccaaaagcacacgggtggagtttgacttgccagaatattctgttcgtcggcgataccaggatttcgactggctgaggaacaaactggaagagtcgcagcccactcatctcattcccccgcttcctgagaagtttgtggtgaagggtgttgtggatcgcttctcagaagagtttgtggagaccagaagaaaagcgctggacaaattcctaaaaaggattacagatcaccccgtgctctctttcaatgaacacttcaatgtgttcctcactgctaaggacctgaatgcctacaagaagcaagggatagcattgctgagcagagtgggtgagtcagtcaagcacgtcaccggaggctataagctgaggagtcggcctctggagtttgcggccatcagcgactacttagacacttttgcactcaaactgggaaccattgatcggatagcccagcggatcatcaaggaagaaatagagtacctggtagagctgagggagtacgggcctgtgtattccacctggagcgccttggaaggcgagctggccgagcccctggagggagtgtcagcctgcattgggaactgctccacagccttggaagagctgacagatgacataacagaagagtttctgccagtgctcagggaatacgttctgtactctgactccatgaagggtgtattgaagaagagggaccaagttcaagcagagtacgaagccaaactggaagctgtggctctgaggaaggaagagcgtcccaaggtgccagcagatgtggagaagtgccaggataggatggagtgcttcaacgctgacctgaaggctgatatggagaggtggcagagcaacaagcggcacgacttccggcagctgctcgtgggcttggctgacaagaatatccagtattatgagaagtgcctcatggcgtgggagtccattattccactactgcaagagaagcaagagactaagtaggttttggaacagagactcttctgcctccacagggcatggaaccctgaaccagaatgtccctgcagtgccggagaggtcgccgtgggaaaacagcacaacagcacctcttgtgtgtgtactttctacccccgcccccagttgttttcagttagtatttattccttggagtctatgagactgtaatcatctctcagcagcatacctccgtattgtgaaggaacctcttaaatggaacactaaaagacttgaaactaaggggcaagataacccccacatgacacgtgacatcactttggggacagcccagttgccattgtgggacagaaccccagtcctgcgtttcagggacatggggagacatgaagaaggcagctgcagcttgctgtggagaccccgtggctctgcactttacccgtgagggcattaacctgacccagcatggaaggaggtgtgggtaccttctcagaaagtccttaatttacagtggcctgtagcctgtggccgtggccgtggctgtggcctgctgcctgctcatgatgagtggcctctgttgacttgtttctggttcacgtggggccacctgaatccgtgtctgtgagcattgacgcttgagtgagcacgccagcgtccttgtccttatgggatgcctcaggatcttgtttctgacaccagaatgcaacagatgagaagctttttggtgtgaactggaaaaaaaaaaaaaggtgcatttttctccgtgaaggtcttagtgtatgtgttttgcttgttaactgtcatcgtggttgggattagacctgtttggaaacagctgctgtcagtgatgctccggtgtgccaagccccagctccgatgtctgctttgtgcaatttgcctttacctcaccaaaaatgtctagtttaatcttcctgccgtgcccgctgactgtctgggcagccttgcagtgggggctgatgtgctgtcttatttttgctgtcacaatttgtaaactcagtgtgacttctatatgagtgttttaaccctcagcattctgtggtcaggaagataaaagcatctgcaggtccctccaagacgagaagagcaacatcatgctctttgcttctgtctatgtggaaatctccgtttgcagccaaaatctgggggctgccactgtacttaacatcttcatttgaagcctttcagatttccataaagccagcaatcagaaaggatctctcttccataccactgttcttgctaaaaggaagctgcatatttgtgttctttcatctgtggctctttgctaaaaatccgtagatctgagctgcaggtaaacggaaggggcgtcgttgtctttaaggtgaggcggccaagcactgctccgtatataagttaatttgtaaatccggagcagacggcatgctaagtcctgtaattccctctaacattgagtcagatacatcatgggacatcatgggatggcagctagatagcatgaaacaatttatcttctcatatttgacaaatttgtgatagaaataataattcccacatctaccggtacttgcctaaaccctgactgtgccatccca

SEQ ID NO: 852 - protein, 611 aa, Mus musculus
PTELWCNARESSASRAGEASGGGCHHQLVQGLGPSGAESCGSKRRPGSRALRAMAGGPPKALPSTGPQSLRDMPHPLAGSSSEEAVGGDSTPSPDLLMARSFGDKLAEVEEKIDQLHQEQAFADFYMFSELLTDYIRLIAAVKGVFDHRMKCWQKWEDAQITLLKKRETEAKMMVANKPDKIQQAKNEIREWEAKVQQGERDFEQISKTIRKEVGRFEKERVKDFKADIIKYLESLDLILPNGGTPAGTDASSSSLLNRLQLDDDIDGEARDLFVTVDDPKKHVCTMYIYITTKSTRVEFDLPEYSVRRRYQDFDWLRNKLEESQPTHLIPPLPEKFVVKGVVDRFSEEFVETRRKALDKFLKRITDHPVLSFNEHFNVFLTAKDLNAYKKQGIALLSRVGESVKHVTGGYKLRSRPLEFAAISDYLDTFALKLGTIDRIAQRIIKEEIEYLVELREYGPVYSTWSALEGELAEPLEGVSACIGNCSTALEELTDDITEEFLPVLREYVKDSMKGVLKKRDQVQAEYEAKLEAVRKEERPKVPADVEKCQDRMECFNADLKADMERWQSNKRHDFRQLLVGLADKNIQYYEKCLMAWESIIPLLQEKQETK

SEQ ID NO: 853 - DNA, 81656 bp, Homo sapiens
  misc_feature (1)...(81656): n = A,T,C or G
gacctcccaaagtgctgggattacaggtgtgagccactgcgcgtggccaacacattctttaagcatctgctgtgtacctggcacgaggggggtaaattaagaaaagtaatatgcagtctgtgtattcagagagccatcattttacccttaacgtaaagatgccttgagaggctttgtcaggctcctctgagactagatcattcacttgcccatattcctccaatagaatcaaaaagagaaattagattgttttagcataacttatttttattaaaactatattggctcctagtctataccactctcttcataaatcatatgtttaatgtaatataaaattttgccagtgatttatgttaatttaatattctgtcttgtggctggctgaccataatggtgtatcttaaaattgaaattctttgaaccagaggagtttgtaaagcaacctcactctgcatctgtcttcctagggtaaagtaaaagtgggaaggagtaagaaatgctcttataatggaaacctacatggtgaaaattggtattttgcaacaatggggagttttcattattaatcaactatgtagttgtaactcttcacaaaggctattctggatatcctttgttataataaaatcattaagaaaatatatttgaggccccaactgtgggtctcaatgcaatttttattttttagcaattattgtgtgtctgctatgaacccagcctcatagtttataagaggatgcaagaatacttacaagcacgtgtgtgtgtgtctgtgtgtgtgtgtatgagagagagagaataggtgatacagcaccagccatgtaccacacactattgcaactgcttccatatactaactaactcaatcccactatacccattttataaatgaggacatcggggcttagattaagaagcttgcttaagttgcactggtagtaattagtggtactgggattcagaactgggcagtctggctcaggttagcctcagttgcttgtccttccacagacatttattgagtacttttgataggcaagggattgaatttggtcgtttctaagattcattcattcatgaaatactgagtacctaccatgggccagggtagcataggagggaagaatctggagtatgtggcaaggtctgattgactgactctcccctccctcactcccaacaactgattcgagaactaacttcatactgtctggccaagacatttcagatctttatgtgggctgttcctggaaggttattggctgaggttcccagggcaaatgttaggggagttggcttgaagtcactacccgacctggggagacagaaagataatcacacacacacactcacagtacagtctcacacacacacacacacacacacacacacacgcacacatgatgagcaaggcacagttgcagtcactggggacttacagtgtttgtggataagtttgatatataaataaatgattaaaactacaaaatgcttcagtggaggtgtcttcaaagtattgagaagggtgtgagtaattctaccagggagtgggtcaaggaaagcattaaaggagaggggattcaagcagattcctggaagatatttggagattattatgtacagcaggggagcttttccagcaaagataaggggcatgaaactgctgggtggttcctgagaactggtccctcggatgtggaaggaggtggtaagaaaggaggctgctgagatcaaaccaggccagattgtgggaaaccactgtctgagctgattttggcatctctgccttaagattgtgaattctttttcttttgtgcagtgtctgtccactgacagagctgttcggaggcccggtgtgctagtgttgataaaatgttaagggagggcccctgtgatgcctagcatggcatcctgcctgaggtcagtgtttaaatgtttactgaaataaccaagacatgatgtttatcctggagttccagagaagatgttgtccccctacaaatccccagacactggggtgtggacgccgtgtgtcccgtggtaccagtacattgaaaaggcagtcccatcagtggctgctgctgtagttggactctgcagtcacgtccacactgagaggggctgttgaaggtatgacgtcccagctgatgagcttgtccatctgccctgtagtcagaagcataacggaagagaaacggaggggggaggtctattgccatgagtaccttctgtgaaaaatggtacccttttagtaattacagtttttttgatattgcgtaggtatgtgattaaatgatctgtggtcagcagaaatgggagttgaaggtgctttttctgtgtactttccattaccccccaagttgggtgacattgcccttgaccccaggccacacttcttcactccgccgtgtcccattgcccttcccagatgtcccgtcatcagctagagctcatggatgtgactgctaggttaacctctaatttcctgtacgttctcttgcatgggggctaggtcataactcacctgcaaaactccaagaggagagaatatagggaaagcaccccctcctccccagcctgtgatctgatggcccacaggtcacccaggctcttcccatggtgtcatgtcactttcttgccatattctttagtctctgtctcccagttattccaaagcgatattcagaggccttcacatctgctgctaggcagggctctgttctgttaccaaacctccaaaccaaacaagataactaactaggccttcttagtttcacagccattttttgaatactgtagggacataatttattcattggcttcttaccaagaccaaagagcgaggtctgcaatttaaaaaatctatctttcccttcctttcctggcatttgtcccactgactaccctcctacccactactctcttttaaaaacgtcatagaaaattttaagcatatagaaaagggaagagaattgtataatgaacctgcaggtaccagcttcaatggtgatcagcttgggcatcttgtatcatttatatccccacctactcatccttaattattttgaagcaaatgccattttattttattcataaatattttagtatataattttaaaagatgaagattttgtaaaatcatacttccattatcatacccagtgattccttaatatcaatattcaaatttccctaaatatctcaaaatctttatctttttgtatcttgttttaatggaattggttgatctcttaagtttctttacatttataggtgcttgcgctctctcttcttttctttttctttttctttttttttttttttttgagatggagtcttgctctgtcgcccagactggagtgcagtggcatgatcccggctcactgcaacctctgcctgccggggttcaagcaattctcctgcctcagccccccgagtaggcgcacgccaccatgcccagctaatattggtatttttttttttttttttttttagtagagacgatttcaccatgttggccaggctggtcttgaactcctgacctcaagtgatctgcctgccttcgcctcccaaagtgctgtaattacaggcgtgaggcactgcgcgcccagccaggtttcttaatgtttacctgggcccacgtggtggtcttgacaaagtgggaaaaacggagtatgctcacagggagctttccttgttgaggtttgtttttttttttttcttttttttttttttttttaattatactctaagttttagggtacatgtgcacattgtgcaggttagttacatatgtatacatgtgccatgctggtgcactgcacccactaatgtgtcatctagcattaggtatatctcccaatgctatccctcccccctcccccgaccccaccacagtccccagagtgtgatattccccttcctgtgtccatgtgatctcattgttcaattcccacctatgagtgagaatatgcggtgtttggttttttgttcttgcgatagtttactgagaatgatggtttccaatttcatccatgtccctacaaaggatatgaactcatcattttttatggctgcatagtattccatggtgtatatgtgccacattttcttaatccagtctatcattgttggacatttgggttggttccaagtctttgctattgtgaatagtgccgcaataaacatacgtgtgcatgtgtctttatagcagcatgatttatactcctttgggtatatacccagtaatgggatggctgggtcaaatggtatttctagttctagatccctgaggaatcgccacactgacttccacaatggttgaactagtttacagtcccaccaacagtgtaaaagtgttcctatttctccacatcctctccagcacctgttgtttcctgactttttaatgattgccattctaactggtgtgagatgatatctcatagtggttttgatttgcatttctctgatggccagtgatgatgagcatttcttcatgtgttttttgactgcataaatgtcttcttttgagaagtgtctgttcatgtccttcgcccactttttgatggggttgtttgtttttttcttgtaaatttgtttgagttcattgtagattctggatattagccctttgtcagatgagtaggttgcgaaaattttctcccattctgtaggttgcctgttcactctgatggtagtttcttttgctgtgcagaagctctttagtttaattagatcccatttgtcaattttgtcttttgttgccattgcttttggtgttttggacatgaagtccttgcccacgcctatgtcctgaatggtaatgcctaggttttcttctagggtttttatggttttaggtttaacgtttaaatctttaatccatcttgaattgatttttgtataaggtgtaaggaagggatccagtttcagctttctacatatggctagccagttttcccagcaccatttattaaatagggaatcctttccccattgcttgtttttctcaggtttgtcaaagatcagatagttgtagatatgcggcattatttctgagggctctgttctgttccattgatctatatctctgttttggtaccagtaccatgctgttttggttactgtagccttgtagtatagtttgaagtcaggtagtgtgatgcctccagctttgttcttttggcttaggattgacttggcgatgcgggctcttttttggttccatatgaactttaaagtagttttttccaattctgtgaagaaagtcattggtagcttgatggggatggcattgaatctgtaaattaccttgggcagtatggccattttcacgatattgattcttcctacccatgagcatggaatgttcttccatttgtttgtctcctcttttatttccttgagcagtggtttgtagttctccttgaagaggtccttcacatcccttgtaagttggattcctaggtattttattctctttgaagcaattgtgaatgggagttcacccatgatttggctctctgtttgtctgttgttggtgtataagaatgcttgtgatttttgtacattgattttgtatcctgagactttgctgaagttgcttatcagcttaaggagattttgggctgagacgatggggttttctagataaacaatcatgtcgtctgcaaacagggacaatttgacttcctcttttcctaattgaataccctttatttccttctcctgcctgattgccctggccagaacttccaacactatgttgaataggagcggtgagagagggcatccctgtcttgtgccggttttcaaagggaatgcttccagtttttgcccattcagtatgatattggctgtgggtttgtcatagatagctcttattattttgaaatacgtcccatcaatacctaatttattgagagtttttagcatgaagggttgttgaattttgtcaaaggctttttctgcatctattgagataatcatgtggtttttgtctttggctctgtttatatgctggattacatttattgatttgcgtatattgaaccagccttgcatcccagggatgaagcccacttgatcatggtggataagctttttgatgtgctgctggattcggtttgccagtattttattgaggatttttgcatcaatgttcatcaaggatattggtctaaaattctcttttttggttgtgtctctgcccggctttggtatcagaatgatgctggcctcataaaatgagttagggaggattccctctttttctattgattggaatagtttcagaaggaatggtaccagttcctccatgtacctctggtagaattcgnnnnnnnnnnnnnnnnnnnnnnnnnnnnnnnnnnnnnnnnnnnnnnnnnnnnnnnnnnnnnnnnnnnnnnnnnnnnnnnnnnnnnnnnnnnnnnnnnnnnnnnnnnnnnnnnnnnnnnnnnnnnnnnnnnnnnnnnnnnnnnnnnnnnnnnnnnnnnnnnnnnnnnnnnnnnnnnnnnnnnnnnnnnnnnnnnnnnnnnnnnnnnnnnnnnnnnnnnnnnnnnnnnnnnnnnnnnnnnnnnnnnnnnnnnnnnnnnnnnnnnnnnnnnnnnnnnnnnnnnnnnnnnnnnnnnnnnnnnnnnnnnnnnnnnnnnnnnnnnnnnnnnnnnnnnnnnnnnnnnnnnnnnnnnnnnnnnnnnnnnnnnnnnnnnnnnnnnnnnnnnnnnnnnnnnnnnnnnnnnnnnnnnnnnnnnnnnnnnnnnnnnnnnnnnnnnnnnnnnnnnnnnnnnnnnnnnnnnnnnnnnnnnnnnnnnnnnnnnnnnnnnnnnnnnnnnnnnnnnnnnnnnnnnnnnnnnnnnnnnnnnnnnnnnnnnnnnnnnnnnnnnnnnnnnnnnnnnnnnnnnnnnnnnnnnnnnnnnnnnnnnnnnnnnnnnnnnnnnnnnnnnnnnnnnnnnnnnnnnnnnnnnnnnnnnnnnnnnnnnnnnnnnnnnnnnnnnnnnnnnnnnnnnnnnnnnnnnnnnnnnnnnnnnnnnnnnnnnnnnnnnnnnnnnnnnnnnnnnnnnnnnnnnnnnnnnnnnnnnnnnnnnnnnnnnnnnnnnnnnnnnnnnnnnnnnnnnnnnnnnnnnnnnnnnnnnnnnnnnnnnnnnnnnnnnnnnnnnnnnnnnnnnnnnnnnnnnnnnnnnnnnnnnnnnnnnnnnnnnnnnnnnnnnnnnnnnnnnnnnnnnnnnnnnnnnnnnnnnnnnnnnnnnnnnnnnnnnnnnnnnnnnnnnnnnnnnnnnnnnnnnnnnnnnnnnnnnnnnnnnnnnnnnnnnnnnnnnnnnnnnnnnnnnnnnnnnnnnnnnnnnnnnnnnnnnnnnnnnnnnnnnnnnnnnnnnnnnnnnnnnnnnnnnnnnnnnnnnnnnnnnnnnnnnnnnnnnnnnnnnnnnnnnnnnnnnnnnnnnnnnnnnnnnnnnnnnnnnnnnnnnnnnnnnnnnnnnnnnnnnnnnnnnnnnnnnnnnnnnnnnnnnnnnnnnnnnnnnnnnnnnnnnnnnnnnnnnnnnnnnnnnnnnnnnnnnnnnnnnnnnnnnnnnnnnnnnnnnnnnnnnnnnnnnnnnnnnnnnnnnnnnnnnnnnnnnnnnnnnnnnnnnnnnnnnnnnnnnnnnnnnnnnnnnnnnnnnnnnnnnnnnnnnnnnnnnnnnnnnnnnnnnnnnnnnnnnnnnnnnnnnnnnnnnnnnnnnnnnnnnnnnnnnnnnnnnnnnnnnnnnnnnnnnnnnnnnnnnnnnnnnnnnnnnnnnnnnnnnnnnnnnnnnnnnnnnnnnnnnnnnnnnnnnnnnnnnnnnnnnnnnnnnnnnnnnnnnnnnnnnnnnnnnnnnnnnnnnnnnnnnnnnnnnnnnnnnnnnnnnnnnnnnnnnnnnnnnnnnnnnnnnnnnnnnnnnnnnnnnnnnnnnnnnnnnnnnnnnnnnnnnnnnnnnnnnnnnnnnnnnnnnnnnnnnnnnnnnnnnnnnnnnnnnnnnnnnnnnnnnnnnnnnnnnnnnnnnnnnnnnnnnnnnnnnnnnnnnnnnnnnnnnnnnnnnnnnnnnnnnnnnnnnnnnnnnnnnnnnnnnnnnnnnnnnnnnnnnnnnnnnnnnnnnnnnnnnnnnnnnnnnnnnnnnnnnnnnnnnnnnnnnnnnnnnnnnnnnnnnnnnnnnnnnnnnnnnnnnnnnnnnnnnnnnnnnnnnnnnnnnnnnnnnnnnnnnnnnnnnnnnnnnnnnnnnnnnnnnnnnnnnnnnnnnnnnnnnnnnnnnnnnnnnnnnnnnnnnnnnnnnnnnnnnnnnnnnnnnnnnnnnnnnnnnnnnnnnnnnnnnnnnnnnnnnnnnnnnnnnnnnnnnnnnnnnnnnnnnnnnnnnnnnnnnnnnnnnnnnnnnnnnnnnnnnnnnnnnnnnnnnnnnnnnnnnnnnnnnnnnnnnnnnnnnnnnnnnnnnnnnnnnnnnnnnnnnnnnnnnnnnnnnnnnnnnnnnnnnnnnnnnnnnnnnnnnnnnnnnnnnnnnnnnnnnnnnnnnnnnnnnnnnnnnnnnnnnnnnnnnnnnnnnnnnnnnnnnnnnnnnnnnnnnnnnnnnnnnnnnnnnaccctcagctgcaggtctgttggaataccctgccgtgtgaggtgtcagtgtgcccctgctggggggtgcctcccagttaggctgctcgggggtcaggagtcagggacccacttgaggaggcagtctgcccgttctcagatctccagctgcgtgctgggagaaccactgctctcttcaaagctgtcagacagggacacttaagtctgcagaggttactgctgtctttttgtttgtctgtgccctgcccccagaggtggagcctacagaggcaggcaggcctccttgagctgtggtgggctccacccagttcgagcttcctggctgctttgtttacctaagcaagcctgggcaatggcgggcgcccctcccccagcctcgttgccgccttgcagtttgatctcagactgctgtgctagcaatcagcgagattccgtgggcgtaggaccctccgagccaggtgtgggatatagtctcgtggtgcgccgtttcttaagccggtctgaaaagcgcaatattcgggtgggagtgacccgattttccaggtgcatccgtcacccctttctttgactcggaaagggaactccctgaccccttgcgcttcccaggtgaggcaatgcctcgccctgcttcggctcgcgcacggtgcgcacacacactggcctgcgcccactgtctggcactccctagtgagatgaacccggtacctcagatggaaatgcagaaatcaccgtcttctgcgtcgctcacgctgggagctgtagaccggagctgttcctattcggccatcttggctcctccgcagaggtttgttttttttttttaaatggagtttcgctcttgttgcccaggttggagtgcaatggcgcagtctcggctcactgcaacctccgcctcccaggttcaagcaattctcctgcctcagcttcccgagtagctgggatcacaggcatgcgccaccacgtccagctaatttttgtatatttagtggagacggggtttcaccatgttggccaggctggtctcaaactcgtgacctcaggtgagccacccgtctcggcctcccaaagtgctgggattacaggcgtgagccactgcgcccagccccttgttgaggtttgatgatggtggggccattatgttctctgcccttgaactgcttacttatattggtttctccagcacttcctaaaagatgaattggcatgaaattgattcaaagcactaccatagtttgtttctcttggtcgtaaaagatttgttcactcaagaaacactgagtagggagaggctcaggtgtttcgaaagttatttttgggttttagaaatgtttattggtttggctaaaccagctgcttttgctgatactctccagtatgtgttttcatttaattttaaggtgctcttttcttcttttaggatctcattttgcccaacggtggtactccagcaggtacttcaagtccagcttcttcatcttcccttctcaacagacttcagcttgatgatgatattgatggtgagactagagatctcttcgttatagtcgatgatcccaagaagcatgtgtgtacaatggagacttacatcacctataggatcaccaccaaagtaggtccctgtgttatagaatgcccgtgttgagtggtctcggggaattggggtctacctcagtgaattttgcctttgctctcccccttattgtacaactctgttcaccttgattgcaattgtgagtgtggcttcttgagagaatagatgtaattcagatgaaaaggattatatataatagttttttaaatcttagaatgaggaagaaattgtaagatttttcaaataaacatttaatccctatacttgcgcttatttttttttaccatgatactatttaacatgttaatatcatattgcttctgaaatttatgaatcattgtatcaacctaaatcactgtgatgagaccatgaataaaatttggcctaggtggggttgatggtagcaggaggaggaataatgggaggatagaaactaatactgtctttctggtatgtgtcagataggtagtgggcaggtgttgagatttaattgattaattaaataacttttaagatcataacaattttttattttgagacagagtcttgctctgttgcccaggctggagtgcagtggtgtgatctcagcccactgcaacttccacctcccgggttcaagcaattctcttgcctcagcctcctgagtagctgagattataggcatgtgccactatgcccagctaatttttgtatttttagtagagacagggtttcaccttattggccaggctggtctcgaactcctgacctcagatgatccacccgcctcggcctcccaaagtgctgggattacaggcatgagccaccacgcccagccaagatcataacaatcttaaaacttatatcctttagttacaatttttcagatgaagaaatagaggtggaaagttcaaataactcgctcaaagttacaaagttggtaaccaggattctaatttgaatttgtaggactatacagcctatattttaatttttaaaaaccatactctttacataattccacttataaaagaataattttaatgtatcatttgttacttatgaaaattattttttgaatatttaaaatagtattaaagttttagtcttggaacaaggtttcccaatcttggcagtattaaccttttggactgaagagttctttgctgtggggggctgtcttatagagtgtttatcagcagccctgtcctctacccatgagacggcaggagtgttctcttggtccccagttgtgacaaccaaaaatgtctccagacattgccaaatgttccctgggggacaggattgccaccccacccccgaccagttgaaagccacatatttagaggaagaatgacaatattgacattattagggagagaattcacattatcactttgtatcttgggataaaaaagtgtttagttaggaagctatcctatttcttggtaccccacccccaccaagtcacataacaaagaatgatttacagatatttttggaacctttaatagatggtgtctttatggaaggcattaagagaagctctgatgagcgtgtccctcgtcttttactgtgtcttttttctttttcattgtagaaaaaaatcattttttattttgaaagttttgtaagttctgtaccttttaaaattctttggaaagacaagcagggaataaaatactcaagttgtgtttcttcatctcttattggatgaaaattttatatttgtaaaaaaataaaagaagcgatgctgaaggccacatgctgagtggaaacagggagcctccctcagcccttcttacttaccttgtccttcttgccaaaagcaaccatggctaaaatttgctgtgtgtccttctagttgtttttctttgcgtttacattcacacacatgtatagttagaatgtatatgatttagatttcagtgtaatgttgctttccaatgttcccttccattttatagtatttttgaagacctttccatgttcatatgaccatgtctagcttactctttcaatctctgtctaattatttatgcaataattatatcttttctctatggacatttaagcctgctccagttttttgatgttactactctgtcttttcttttctatcttttttttttttttttttttttttgagacagagtctccctctgtcgcccaggatggagtgtagtggcgtgatctcagctcactgcaacctccgccctctgggttcaaggggattctcctgcctcagcctcccgagtagctgggactacagatgtatgccaccacgcccggctactttttgtatttttagtagagatgaggttttactatgttggccagcctggtcttgaactcctggtgtcaggtgatctgcccgcctgggcctcccaaagtgctgggattacaagcgtgagccgctgtgtccggctgctaccctgtgttttctgcagcaggttcgcatgtaaagatatgtctatgtaagtacgtgtgcacatgcatagtcttaccccactacaccactgggcacctagcccagacattgggctagatgcttacatatattatttcctcagaggacctagattaatatacatatttccaggaattatatccatttatttatttttttctagggtgaccttattttttaccctgtagtcagtgaaaggtaagcctgtttttcttgacttagtgctgtaaacagccaaatgacaaagtgaccgccttgctggcacagcagtgcttgcccactgtgacatttcccctcagcttcttgatttttctgccccaaaatgcaaatactacaggactcccattaactgattgagaggctaacgcgcaactgcaactcaccagtctttcctgtgctgcttctctttccttccctacctttttccttctgtgttcttatttctatcccttctcttgggcttgatttcctataagtcattaaatgccttagagtaacgttttccaagttctagcagcacattttcacttggctgtgatgccagcacctcaagataatcttgttgcagaactgagttttactttttatcatttctttcacttctgatcccaaaccagagttgtcttcttttcctgtttctaatagtgacaccaggtttatattttggtggtgcattcagaggcttctttctgaagttgtattgacggatatcgtaggggtgtgtgagaatgagagaaagagaacaaacaagaggaacacgggatcccaacacctgaccctgtcctgggacttccacttctgcagaggtcctcaaacgaagttaatggtcagaggacaaggttgttcaaatgctttgctttattaccttaaggctttgatgctctagtcctaattcagattcctgatgaccagggctggacaaagtacagagctctttttgcctgagctaaaataagtgaaggctgacagccaatgtaggcaaagaattatccacccaaatctaaggtaaaagtatcttctctccccagtggtggagagccagtttaggccttcttagggcaggcagcttctggctctttttttctggagactacaagaaagtaacatcataacagcagctagttattggacacttaccatgcactgtacttttttgcagttgaaacccttttatttttatgttatataagtaatgtatgttcattgtagaaaaaaaagaaagttcaagtaagctaaaacactaaagaatgcctatacgctcaccagccagaaataattgttgctgactttctatactacttcatccagttacaaaaacgagtattttgtatactgccaattcacttaatacattgtgaacatgtttctatgctaggaaatgccagtaagcatgcttttatgctattgtttataagactgcaatagcgttccattgtatggatgtgccctcatttattttgtgctaaatgctttacgtatattatcagttaatcttcacactcaatgaagtagatataaatactattatcttacaaatgagaaaattgagagacagagatgttaagaaaattgctcaaagacatgcaactcatgggtggtggagctagaacttgagtccaggtctctctgattctaaagataataaatattaataatcttgcccaaaagacatgattttctttctttttttttttttgacagagtcttgctctgttgcccaggctggagtgcagtggtatgacctcagctcactgcggcctccgcctcccaggttcaagcgattctcctgcctcagcatcctgagtagctgggattacagcactgtgcctggctaattttttgtatttttagtagagatggggtttcatcattttggacaggctggtctcaaactcctgacctcaggcgatctgcccaccttggtttcccaaagtgctgggattacaggcgtgagccactgcgcctggcccaaaagacatgattttcaagagagggatggccccgatacccagcactgtggtccagtagcatggcctgtgtggttgaaactgacaatacagaagtaggcttgagggtgaggaaacagaggcgagccttcaactcccttcagggtttattattttcttgtgtttagcctcattaccagtggtgtgtaaaaaaaaaaagaaaaagagtcataacaccccaactagttcctctttctaaatgcctcagtggtcaacagagtctaaatgctgctccgaggctgaattatgtacaatgcaaagtggacgttagtttaatgacacagttattgctggttgtggtgtgagcagtttcattggtgtagtgatgcagaacccaagtgggttagagtgagcgaggggtaagagagagaagagtattagaattctggcaatgaaaacaagcatagagagcagtggtcagaagtgggcatgggtttgagggagagggaggcttttttttttggactgctgctgtttttaaggatgaaagagacttgtttaactgccagttgcgcagtattggtagagaagaaggcattaggttgaagattggagagtaggatggaggctcctgggaaggcggaggaagctagaattgccaccgaaggggcggtgtactttttccattgtttgtggagaaggaagggaagtttgttttgtggcaggaagttaaggggttctttgcttatatctggagttttctctctgaatagatgatgaagccttctaagggtgggggtggtttgaagtggggattagaaattttcacaacttttatgggctttttgataaatgatttggacagtgtgggagtgagctgatgtaagggagtatgaaaagggtgcctggcaatgttggagggtctggttgtagaatgtatcgtgtctgtccgtgtgtttgcttgattttgtttctcctctagcagtgtgctcacacacccaggtctggtagagcaagtgggtttttacgagttgggtgaatgggcagtggggagggaacaacatttagatattgctgtaagtgattgaagttctgggccatggaatggatgctgagtaaagaaggaaggaagtaaagacatgaatggatggaatgtcaaggaactttaggtcccaagaggctgagaaaccaaggatgttgggaagaggaagagcctgaaatataggggatgccgtttagagggagatgtgtgggtttctccctggtgacggtctgggagaggctgtggaatggaaggaaacattgcttgcttagaggctggtgttgtatgtatgagccacctggatctcgagggcacttaggttgtggaagggcttggaaaggaagcctgagaaccagctgcttgaatcttcagggcatcaggagaaatggcagagctgtcagtggatgacagctgtgcgggagagatacaggatgtatgtcactggatggcacgagcctcagaagggttttcacagggcggttggggagtggtggtcaggagctgtgtggaacgaggagcatgtcagcagcagctcctggccttgggggctgggcgaggcttgtggaatgcgagcagctcacagagggaccgatggcagggaggcccgattctcagggagagccaggtttcagaatttgaatgggcagaagaacgacaagactttattaactatggcgtgggtcttccagagagcttggcagaaagatctgagaggaacgagataagtggaagtccatgttggaagaaaggaaggcagaggagcgtgaggatgaaaggctggaagcctctacttgtcattctcagggcagtggggttttgaggcagaatgggactagctggtttttgtttgataagggaagagatccctttgttgggagatgggggttgcctagaattcttaagacccagctgtggcctggacagatggcacttgtgataaagaccacgtctctctggagtgactcaattgtaaattttggatcaaatggacgttcttcggaacggccttgggccacagttgttgggcatgtcagctcttggggcataaggggagaccttatgtggtagggtgagtggggcccagtaggtggagtgccctgctggatgaccgattagactgtcattctgtgctgggtcttctaaaatgttgaacttctgaaggaaaaaaaaattgccagggatgtctggagatgaccagggacgtatccacgtggagtgatggtgttacacttctagcatagcaaaaatgagccttcttgactatgattcttgtgcttggtcacctgttcttagacctgactgtacatgtgcgcccgtgaccttgtgatctttggacattgtgcattgtggacacacgatgtggaaggacatagaacaaaatgatgtagtggttgtctctgattatggaattgtgtgtgtatgcttttcgttcttttaaaaaattgtttactataggtattcaaaaatagagataaatgtatatttttaaattttcctaagttagatcctgaatttcatggaggaaaaatttactacaaacttatctttggagttttactggtctgcctgttttatgaatactgtgagtcctataaatgtgtttctctccagaaattccaagtagtgtctctggcccagtttcagctggtgtgcagtgtttcattgtgagtgtgttttgctagcctcattcctggctctactttttccctctgtccttgttttttctttccttttcacctacttctaatttatgtcatttgattgtattttacctatcactatatcttttctagaacaaattgtggtaaaaataagtaaaataaatactgggtcagagagtgtgcaagcatccatttatttatttatttattttttgagacggagtcatcctgtgtcacccaggctggagtgtagtgatgcgatctcggctcactgcaacctccgcctcccagattcaagcaattctcctgcctcagcctcccgagtagctgggactacaggcatggaccaccgcacccggctaatttttgtgtttttagtagagatggggtttcaccatgttggccaggctggtcttgaactcttgaccaagtgatctgcccaccttggcctcccaaagtgctgggattacaggtgtgagccaccgtagtggaccttgagcatccctttcatgataacttcttacgttattgctttccaaagcatcaagcaggtttttcttgctgtattaagttcccaatgtccttaaaggagcttttaaaaaatgagcattgtgtgtgtgtgagactataaaaatagtgtatgagaatggtgtaaaatttggaaataagagtgaatataaagaggacagttctcattattagctttaaatttttcttctaaattttttaatatccagatattaatgtaaatgaaatccttatgtacaattaattttgtatcctcccattttcccttaaaacaacaggccgggcatggtgcctcatgcctataatcccagcactttgggaagctgaggtgggtggatcacttgaggtcaggaatttgagaccagcctggtcaacatggtgaaaccccgtctctactaaaaatacaaaaattatctgggtgtggtggcgcacgcctgtagtcccagctacttgggaggctaaggcaggagaatcacctgaacctgggaggtgtggaggttgcagtgagccgagatcatgccactatactccagcctggtcgacagagtgagactccatctcaaaaaaaaccccccaaaacaacaatgtcttataccctggttgtggtggctcatgcctgtgatcccatcactttggaaggctgagacagaggattgcttaaggtcaggagttagagaccagcctgggcaacatagtgagacgcctatctctacaaaaaaaacaaacaaaaaaaacaccaaaaatcagccagatatggtggcatgtgcctgtagtccaggtacttgggaggctgaggtgggaggattgcctgagcccaggagtttgaggctacagtgagctatgattgtgccactgccttccagcctgggggactgtatttaatttttttttttttttttttgcgagacagtctcactctgtcgcccaggctggagtgcagtggcgcgatcttggctcagtgtaacctctgcctcccaggttcaagcagttctcctgcctcagcctccagagtacagtagctgagactacaggtatgcaccaccatgcctggctaatttttgtatttttagtagagacagggtttcaccatgttggccaggctggtcttgaactcctgacttcaagtgatccgcctgcctcggcctcccgaagtgttgggattacaggcatgagccaccactcctggctcttatctaaatttaaaaaaaaaaaaaaagtcttaccaacaaaattactgacagccatagaataaatatgccataatttcattaatagtttttaattattgaatatttaggttgctttgattccttgctgatttaaataatattgcaatgaagatcattatgcaaatatccttgccacagtttagacattattatccaatggtagattcctagaagtagaaaagcagtgattagacataactagaaaagaaaatcatagagactataggtgaatatttttataagcttgcagtggggatggccttcttactgaagaccccaaaagtagcataaagggcaaatatggatgaaatcaacaataaaacaatggaaagattctgtatcagacaaaccatttggaaattatgataggcaaatggtaataaagaacttacacaaatgaaaaagacttgactcaatttttatttttatttttatttattttttgagttgaggtcttactctgtggctcacactggagtgcagtggtgcagtcttggctagctgtaacctctgcctcccaggctcaagcgatcctcccacctcagcgtcctgagtagcagggactacaggtgcatgccaccatgcccggctaatttttgcattttttgtagagacagggttttgccatgttgctcaggctggtcttgaactcctggactcaagctatctgcctgcctcggcctcccaaagtgctaagattataggcatgagccactgcgcctggctggacttataatttttaaaaagacccctgataaaagaagaaaaatacttttcttcttttggccaataaacatttgaaaggatgttcaaccccaatagtaattaaagaaacaactgtaaacaaagatgatgtattatttttcatttatcagtccaccaaagataactagttcctgagaatacgtggtaagaatataaattgctatatttctgaaagcagtttgtcaattaaaaagtatatgtacacttttgtccagcaattctatctttaggaatttattttaagggaattacgaggtgctcaatgatgtttacaaaagtattgtttattgatggaaaaattggaaacaacttaaatggggatttggtttaattatcgtgtaaccattcagtggaatactatgtatgtgttaaaatgactgtacatctgaacttactgctgcagaaagatgtccaagatgtgctaaaagagatacagacaatgagtaaatgaatgaatatgcgtagaaaaatatggaaacatataaaccatgttaattgtgtttttctgtatttagagggattatggctgatcttttattttctatttatttttcttgaagttttaaaataagtatataacccgaataaatagaaggaaaaaaaaaaagcctgttccccaaaagtgaaattggttgtggcaaaaataaaacgtgtgttctattgtgctgtcttttgtagttaccaaaaatgatttcaaattagagtagaaatattacataaactgtaatttatgaaatggatctgaaaaacataagagaaatgatcagttaatagtgtaactttttttttttttttttgagacagggtctcttgctctgtttcccaggctggagtgcagtggtgcagtcttgactcactgcaacctccccctctggggttcaagcaattcttgtgcctcagctgcctgagtagctgggattacaggcacccaccaccacaactggctaatttttgtatttttaatagagacagggtttcaccatgttggccaggctgatcttgaactaccgaccccaaatgatcagcccacctcggcctcccaaagtgctgggattacaggtgtgagccactgcgcccagccaataatcgtgtaacatttaagaaggcaaaaagtagagccttccatcagtttggtttacaatgaaaaccagttgctttaatttgtcacctttcaaaatatgtctttcattagcccttaatcattggcaagttctcacatggagcctatcggggggagatgggaggtcttgaacttcccttccaacctgcttttgtttttttgagacaaggtctcactctgtcgcctaggctgaagtgcagtggcacagtcagctcactgcagtcgtctcgacctcctgggctcagacaatcctcctgcctcagcctctgagtagtagggactgcaagtatgcactaccacacctggctaatttaaaacttttttttgcagagatggggtctcgctatgttgcccaggctggtctcaaactctagggctcaagctaatccttccttcttggcctcttaaagggctgggattacaggcatgagccaccacgccctgccctaactctcttcttactgttgaacctagggctcaaggaggcttagtgacatgttagggatctggtagggatgcaagaactgcataggcgcagagtccttcctactccacctgtgcgggtggtgtggggatgggagtatcaggccacttgttcccaatatttctgtcatgctgtgcttgaaaatttgtcaacaatgacttgctctctggatttaagtgttgtcttttttcctctctctccagtcctacaatgctagttcctttgggaaaatcatctgataagtcacaaatacctacattgagtgaatttccccacatcttcacccttgcaaacacagaggaaggtcgtgtttcataggcatatgctggtgtgtgggacttgaagaggggaaacaatgcagttagttgggggtcagtccaagaatgagtccttgaacttcaccattttgctaagacagtgaacacaggttttggggaggatgaaatcataatttttgatgctagagctgttcacagctttttctttgatgaatgactctcgttcatgtgcttaaagattttcttggtgctgtgaattaaaacagacttttggcttgaaagagtaaatttatgagatgtagcttgacccatttttatcttgtactttaatttctgagaaccatgacagtcatatagtgtgtatcctcatagggaaaaatggcttatgtgagacacggtgtaatttgtgccagtaaatgagtaaaaatcttgttttggtaaaaatcaactcaattttatttaacattgattttcattattaaagtgctgcaatcacatttcagaaaactttaaaaattgagaaaaagggatgagattattaatatttttctgcaatgcaatggcatttttgtattatttctagattttttcttatctgtctaaaatataacagttccagggttgtggtttggcagaatgtggcaaattaagcaaaaccttttctattttcatctaatctgcccccgaaatgagcagtgatctattatctttactttttgtttatttcctctttggcaaaacttgtcagcatatttagcagaaggtggagacaatttcttttcacagatttggatttagtagcaatatcctaagtggattttttctgctaaaagaaattgttagagttaagcttggaggaaatgaatcaaatgtttctaaacaattctgggggatagttgaattctatttcctgacggtagggaaaaaaaaaaaactggctttttttttttttttttttttttttttttttgagacggagtctcgctctgtcacccaggctggagtgcagtggtgcaatctcggaaaactggcatttttattccagctcgttgaatttttaactgggctaagtgtcccagactggtctattctgtgttggtaaactctgccatttggctgttgtgtttggtggaaggaaaatatgatcttgcctagtttggttattctaagagcttttttccttcccttcagccaagatatgctattcccttatgcttatttttttccattctcttctttgcagagtactcgggtggagtttgacctcccagaatattctgttcgtcgaagataccaggattttgactggttgaggagcaaactggaagaatcccagcccactcatctcattcccgtaggtagtaagtcactacagcttgtttctcacttgtcctgtgttgtctttcctgaaggggttcactcaactctcatcccttaagttatacagactcacccagcaaacatatataaaacatgttaacggacactgtatacaatacttcacctattaggttttagtttctgatttggtatatagaaagccagttttgcggctggctgggctttctttagccacagcggcagaaatctagcacagaatccattgccacagtttttcatttaaaaaacaagaaaccacctaacactgtttattgaagcaacgtgacatttatctactccagcgcttccatctgcacagtttttaaaaaacagaaccagagcaaaagaaatttaaatcttttttttttttttttttgagacagagtcgcactctcttgcccaggcaggtgcgcaatggcatgatcgcagctcactgcaacctccgactcccaggttcaagtggatcacctgcccctaccaggttcaagtggatcacctgccccagccttctgggtagctgggattacaggcatatgccaccacgcccagctagtttttgtatttttagtagagatggggttttgccatattggccaggctggtctcgaactcctgatctcaggtgatccaccgacctcagcctcccaaagtgccgggattacgggtgtgagccaccgtgcctggcctcaacatttatattgagtacttttctgactacttttgttaaaagtagaaataataacggtttggacaccagatgtttctttgggccttgggggctttagagcagtttgagtcataaaactcctcagaggggctgatttatctttcagcaaaaacctttgttgaatgataacttcctaggactaccaactttctgttactaccgcatctcccagcctttttccccccatggttagaagaggctgtgtatgttgtgaatgcactggcagttttctcagttttcagggtgaaaagagccacgttgccagtactgtgataggaacgatggctctcacctgggactcagttctttctcagggtatctcctttttcctccacatacttttctgttctccgagcctgaagttttgctttttctgtcttctaaccacttaaaaacatgcctgaagaggaaacagtagtttttaaacagttgggaatattccttaaaatagaatcctaaggtggcaaaataggcagttagtgaataatttttaaaaaataaactgcattttagaacattatcagaattacagaattattgtgaaggtagtagagagaattctcaagcctcacatccggtattaacattttatattagtgtggcacttttgtcaaaatgaaccagtcattatgaaataaacaccattattaactaaaagtcttttattccaagttcctttttatttttctttctttcttttttttttttttttttttgagatgaagtttacctctgtcacccaggctggagtgcagtggcatgatcttggctcactgcaacctccgcccccggagttcaagcgattcttctgcctcagcctcctgagtagctgggattacaggtgcacaccaccatgcccagctaatttttgtatttttagtggagatgagatttcagcatgttggccaggctggtctcaaactcttgatctcaggtaatcctcccacctcggcctcccaaagtgctgggattacaggtgtgagccaccacgcccggcccaagttccttttttctgttccaggatcctacccaggatcccacattttatttagcagtcatgtctccttaggctcttcttggttgtaacagtttgtcaggctttcccttttttggatgaccatgactgttttgaggagtactagtcaggaattttgtagacttgtccctcagttgacatttgtctgacggctttcccaatcggggtaatgtgtttggggaggaaaccacagaggcaagctgccaccctcatcacctatccagggcacgtgctgtcaacagtgtgcctcaccattgatgtgaacctccatcgcctgacttgaggtagtgctggtcagctttcttcactgtacaattactctttctcccagcctttttgtactgtactctttggaagaaagtcactgtttatttatagcccacaccatgcatcagggagctgccctcctggcagctggtgcctgtgaggttgatactggaagcgcaaaggtaagacagtgacacctgctggttgaaacatagtgtctactcttccatagacactagaagagaatggaagaatttccggaatgcccaaagtggatccagaatatctttaagtgtggtttctgatggtctggatagaagcagttggtaggaagctactttagaaacaagcagaaacttaattttttttcataaattcttggtacttgcatatctggagtggagatttaatatgggagagcctctctgatttaagtatgaaagtcaaaccagcaaccaacccccctcatctgctacaaaaaaattttatagtagctttgctaggaggtgtctgtctgttatttaagtgtcatctttgggaggaagagaggatgggatgagaaggttataaggaagacaaaggacccctgccttggggaacttattatcagttggagacccagcaaacatgcagaaatgttcatttccctttttaagaaaggatttattgagattatataacatataattcacccatttaaaatgtacaattcaaaggcttttagtatattcataaaattggacaaccatcagcattatccattttcaaatctttttatcaccccaaaaagaaacctcacatcccttagctgtcacttacaaacactgtatatctcccagcccctggcaaccactcatgtactttctacagatttgcctattctggacatttcatgtaagtgaaatgatacacaacgtgattttttttgttactgggttttttcacttagcatattttcaaggttcatccatgttgtagcatatattaatatttaattcctttttattgccatataatattctagtttatggataataccacattttgtctattcacccttgatggacgttttggttgtttcaccttttggctattatgagtaatgctgctgtgagcgttcatgtacaagtttttctgtggacatgttcccattttggggggggtgtattcttaggaatgtaattgttgaatcatacataactctataattggccttttgaggaactgccagactgttttcaaaagtgatgacagcaacttacatttccacacgcgatgtataggagtttctccacatctccatcaatgctgttactgtctgtcttttggattgtagccattctactggatgtgcagtgctatctcattgtgattttaatttgtatttccctaatgatgttgagcatcttttcatgtgcttttgggcatttgcatatcttccttggagaaatatcaattaagatccattgcccatttaaaaattggggtgccttttcatccttaaattttcatagttcttttttcaaattttatatatatgtgtgtatatatatatgtgtgtgtgtatatatgtgtatatatgtgtgtgtgtatatgtgtgtatatatatgtgtgtgtatataattttttttttgaggcggagtctcaccctgtcacccaggctggagtgcagtggtgtgatctcggctcactgcaagctccgtctcccgggttcacgtcattctcctgcctcagcctccctagtacctgggactacaggcgcccgccaccatgcctggctaattttttgtatttttagtagaaacagggtttcaccatgttagccaggatggtctccatctcctgacctcgtgttccgcctgacttggcttcccaaagtgctgggattacaggcttgagccactgcgcccagccccattatatgtataaaattttaagaggcaggaatgttgttttgtcacccaggctggagtgcagtggtatgatcacagctcactgcagcctcgacctcccaggatcaagcgattctcccacctcaacctcctcaggtatgtgtcaccatgcctggctgatttttaatttttttttgtagagacaaggtgtcactgtgttgcccaggctggtcttgaactcttgggctcaagtgatcttcccacctcagcctctcgaatagctgggactacaggcaccctatgccatcatgcctggctaattctttttttggtagagacagagtcttgctatgttgcccaggctggtctcaaactcctggcctcaagggatcctcctgcctttgccttctaaagtgctgggattacaggcatgagccaccgcgcctggccaagagtaaccatatgttcttaaaatgccttcttggaaccagaagtatgctggttgtatatgtttgtcatctcataacagcagttcactgtgtttttcttcattatgtaatagttggagctgccagaaagtcttcattatgactttttccctctgttttttttaaagcttttttgagatataatggatatacagaatagccttgcacatatttaatgcatacgattcgataggcttgtatgtacccctgataccatcaccacaatcaaggtaataaacagatccatcaccttcacaagttttcttttgtccctttgctgttttgttttttttttttttttttttgtaagaacctgtaacataagatgtacataatgtgtaacatgaacatgtaacataagatctctcgtcttatcacattttacagcatgcagcaccatacagtcattcccccttatttgtggttttgctttccatggtttcagttacctgtagaccaaaaatatgacatggaaaattccaaaaataaacagttcataagttttacattgtttgctgttctgaatagtgtgatgaaatctcatgcagtcccgcctaggacataaattatctttgtccggtgtatccacgctgtagacattgcccacctgtgagtcctttagtagccctcttggttatcaggctggagatcacaagaagaagaatgaatacagtaccataagatgttttgagagagaaagagaaaggccaaatccccataacacttattacagaatattgttataattgttctattattgtgaatctcttactctgcctgatttgcaaactaaattttactataggtatgtataggaaaaaacatatacatatataggtatgtatatacaggtgggaagttcacttgagcccaagagttcaagaccagcctgggcaacacagtgacaccttgtttctaaattttattataggtgtgtatatataggaaaaacatagtatatacagggttcaataccatccatggcttcagcatctgctgggggtcttggaatgtatccccctaggataagggaggatgactgtattgttaactataggtaccactttgtacagcagatatctggaacaacttatttatgttttataacactagctttatatccattgaacaactccccatttcccactctccgtacccctggcaaccaccattctattttctgcttcggtatttgttcagtgggtttgacacttctgcatttcctggagcactagttacacagcagagcaatttcatgattagatgggtgcccgtattagatttggaagatgaagcagatacattgaataaacacttgagtgtttaattttcacttggaaatttaatgtttacctcagttttaaggaagaaagctttctggaaggatacatttgtattatgtccaagttttcttttgagtagtagtaaactcagaggaattaatgagaataaatttgtaatgcaacaattttttttttaatatgaaataataaaaactccattttctagttgggttcttcttttttctactgttaaaaatatacctgcgtttagcttattcaatggataagttaataagtattgaaacattggttcaacttcctaatgctttgcattaaactgggcttggtgattattgtttttaatctctgcgcttggtgacaagcttttaatctctatgctcctttatttatttggtagtaatttttgcttagaagcagtattttctattagttcgacaagggtaggagaaataggcctctgccatgtaaatatttaatgtgcactaaatatttgttgaattgcttagaagaagcaagtcatttgctgacgaggaagttggacatttcaggattcagcaattgaaagatttgtctagatttcctacccagaaatagcagctttccattgacagtctacaacaaatatgctattgtttcagattataaaacagctttataaactaatatggaatataaatgacagtgctttactaaagtactaagtactatctaatatcagtatttcaagattaaaccctgaaatatttaatggattattgtaatactttgcaaataggatttttttgcaggatccaacatatatatgtgtatattcagtttctaaaaatgttttcattgtagaaaatattaaccatattgaagagattcagtacgatgagtcccgttgaaactccatcactcagtttcaacatttatcagctcatggccaatcttgtttcatcactgtccactccctcacccctacacccaggtgtttttttttttttaagtaccttaaacaacagaaatttattctcttacagctctggaggtcaaaagtccaaaatcagttttagtgagctaatatcaacatataggctagggctgcattccaccagaaggctctaggggagaatttgtttgcctaccttttctagctcttggggctgtctgcattccttggctcatggcctctttattttcaaagccagcagcatatctgtcatcatctctgcttccaccatcacatctccttttcttaaaaaaggaagtaaaatccatattacacatcaccattttaaccattctgaagtgtccaattcagtgacttttagtacattcacagtgttgtacgaccatcaccaccattgagtgttgtacgaccatcaccactatttaatccagaacattttcattacccccaaaagaaactttgtacccattaaggaaccactctcaattccctccttttcccagcccggctataatgaagaatgctgctatcaacactggtggttgtctaagattttgtttgagcacttattttcagttaccttggctatacaacaagaagtggaattgctggagcatatagtaattctgtgtttaattttttgaggaattgttcaaacggttttccacagtggcttataattttatatctgcactagaaatgtatgagggcccaatttctccacgtatttgccaacatttgctattttactttaaaaattctagtgggtgtgaagaagtagatcccaaatgacttgtttttttgagacaggatctcactctgtcacccaggctggagtgcattggcatgaccatagcttactgcagcctccaactcctgggttcaagcaatcctcccacctcagcctccacagtagctgggacttcaggcgtgcaccaccatggccagctaattttttattttttgtagagatggggtcttgctatgttgcccaagctggtctggagctcctagcctcaagcaatcctcccagcttgacctcccaaaatgctaggattatagacatgagccactgtgtctgcttcccccaatcgattttttaagacattttggcctaaacgttatatagacattctacctgtaagtccactcccctttttgctttttgttctcggtgcttacaaattaataaaaatacttggcatttgttagacatctgctgtgtgcctggaactgtgttgagctcttttcatttacatgatgtggtttacagactatagatggacttgatttcacctgcaacccagattcctatgtgtaaacaacccagacagtaatagaggtgaggctgagagtaggtgtgtcccgtaaggaatcttgaaatagcaagaaatttctgaagctacatacatttggaaatgataacgcttatgacaggaggaaattctgcttgcagaaggattctctctagggttcctttaaatatcaagtttccccgattgatgaaacataagttcaatttgctaaatctgaagaatggacccctattgtagaatgtcatctttatgttaaatgaggcactcctaaccacttacttgcgcctcaggccatcctctcaagtcttattcagcagaagcaaatgagagtatcgtaacaggactcatgaagtaagaacaggaaaatatccactggatttggtaattagaaagtcattggcactcaattttaaaagggccgtttctgcactgggtggggatagggcagagaaacccagcactgaaggcagtatcacagctggttttgctttgagggttggcagaaggctgggggttgagaaatcaatgggatacagtgaagtcaagataagtgactcctttcaaaaagattgaatgagccaggaaggacaagggagaagatataaggtcaaggggtggttggattcgtattttttaggaagaaaaaccaaccatatttttatagattctgggaatagagctggatgaacaggagatgttgaagatacagggaagagattaatgacaggtgcaccccaatgaacaaatgggtcaaggacacagatggaatgcttagctttaggggaggaggggttgttttccacaggggctaaggaatggaggtgagggtgatgcccagtcaatgggcttctgtggaggaagcaaaataggaaatttccatctgatgctcttacacctggttctcacttcagaaagatagtaatctgcttagcacgaaaagctggggtatgagaatggctgcctaaaggaacgggggagagaagaactgaccagaataaaggaattatcctaaaggacagccatatcccattaagataacttctcagtgctttggactgggccagcatcgggctgagtggcccgtctgtctgatccagcactgcatttcgaatattctactcaagtgtaagctctgctgggtgtcacacgtggacatgttatccttgtgtgggtctgtaattttattcctgactctattcccctctcttctttcatttacaaacctttccactgtgccctttttggaactcctgctctgtcataaagaatcccccagtattcttaacatcttctctgaatattcccaccatgtcaaggtttaaatgaacactggatgtccctgaagattagtagtcccctgaagctgctgccagtcttacaacaaagacacccaaacttgtgtgtgtttaccctgtggtaggaatcattcaaagcactttcagcatattagctaatttaatcctcatgacaaccctgtgaagttgatgctattagtttttacctagcaccaacttcttgaggtaccaagaaatgtatagaacttgacggtaggcaaacagctagtaggtggcaaagtcaaaagataaacccaggaagcatggcatcagaatctttactcttgataactaaaacatactttctgaagctctttcaagttgagggcactgaattccctcatactccaaatacttcttttccagggggtggggtgttggtgttaccaattcctaaatcttttcaaggttttgtgttctaaatctaggtttactaggcctactccaagtggcctagtattccacttttttgggttggctaagtccactaatccttgttgctatgtcttatttctggtttgtttttgtccttcagggtttataattttaaaaaatcctctttattgccatattatgggggtttgaggaggttgtggagttaaatgcttgtgtttaatgtcttactttgaacttgaactgctaggttggtttaacattagaaaatatattaatttaccacttaccgtattaaaggaaaaagcatgtgattgtcctgatagacctgcttggccaacgttgtcttggtttattccctaaagaggcttgcattttctaaagaggctgcatctgcacgagtgttcacagcagcattgttagtagggctataaagctgaaaaccattcacatgatcatgcacacgttcacaggcaggagagtaggtggacaatttgtcacacagtcagttatatagtgcgtgactatggaacagtaaaattattttcctgtagctaaacatacatcaatatggataagtcgcagaaagacaatgttgaatgacaaaagcgaactatacaggtgtgtactgcatagtgacatttctgtcaatggtggatggcatatagatggtggtcccataagattataatactgtatttttactgtaccttttctacatttaaatatgtttaggtacccaagtacttgccattgtgttacaattgtctacagtagtcagcacagtaacatgctaggagcaatagcctataccgtatcgcctcggtgtgtagtagccgcaccatctaggtttgtgtaggtgcactctgtgatgttcacacaatgatgaaattgcctgacaatgcatttctcagagtgtatctctgtcattaagtgacacattaactgtaattttattttttataaagttaaacaagctcaacgaacagtacatggttttaaaactgaaacttagaggggagcaatgaccaaaaagttgaggattgttaattccttcatgggggcaggaataagcggagatctgatcagggatccgttgacagggaactttgtcaatggcagtgttctctctgtcaagttgagtggtagattaataagtgctggtactattattatgctttatgactttgaggtatgtaatacactcttttattgtgctaaaaaacatagcaccattttataatctacaattcagtggcatcaaatacattcacaatgttgtgcatctgtcaccaccttctgaaaagtttcagaatcaccctggaaggaaaccctgtacccatgaagcagtcacatctcatttcccccgatctctccagcccctggcaaccaccatctactgtctgtctctgtgggtttgcctattctggacatttcacatgaatggaatcatatatatggacttttgtatctggctgttttcatttaccataatgtttccagggtttttccatgatgtagcatgttttagtacttagtttttatgacaaactattagtccattgcatggatatgccgcattttgtttgcccattcacatgttgatggacatttggattgcttctgccttttggtcattgtaaacaaggctgttatgactatttgtgtacaaaattttgtttgggcacctgctttcaattttttttttaaagttttaaaaaatgtttgtttgtttgagatgaagtctcactctgtaacccaggctggagtgcagtggtgcaatctccactcactgcaacctccccatcttgccagcctaagctatcctcccacctcagcctcctgaatagttgggactataggtgcaagccaccatgcccagctaattgtttttatatttaatatttttggtagagacgtggtttcaccatgttgcccaggctggtctcgaactcctgagttgaggcaatccacctgccttggcctcccaaagtgctgggattacaggcatgagccaccacgcccagccttgctttcagttcttttgggcataaatctgtgagtggaattggtgagttttatggtaattctaaatttaacttattgaggaaccaccaaactgttttccacagtggctgcacattttacattcccaccagcaatgtataaatgttctgatttctccacatcctcaccaacacttgtttttttttgtttgttttgtttttgtttttttttaagattatggccatcttagcaggtatgaaatggcgtatcatgatggttttactgatgttaagcatcttttcatgtgcttcttagccatttggatatcttctttagagaaatatctattagatttagttgcctattttttaaatgtacaattttaaaaatatttcatagctcaaatattttaaaacatgtgcatagcagatacttcttttccctgtggtagtaataatgaagaaggctttttaatcaagcagttgatcaaactactatggaaacagattaaaagctcaaagatcccttggtaggcaggtagttttaaattgcccacagtattgactctaagtcagtataatagagaaatgtatttgaataaggggaataaaggaaattacgttttaaataacttttgagtataaacctaaaccaaaaaattggcctataaaaggtattttttttagatacatgaatttacctaatttattcattcaccaagtatgaatggggaatgaagtactgggagcagaatcttaaaatatttaaataaatttttatgtggttgatgcctgcctgcctgcttgccttctttcttttctttttctttttcttcttttcttttcttcttgccataacttttccatcatatcacgtgtacatcaagcaatgtaaaaattactgttgaatttactggataaatatctacttttctgtatttcagagactataatttagtgttttattccttgcattataaaattgacagggtatttactccatgtgtatttttcagaagtctttatattaatgactacatgaagatctgcctgattaagaaatacttttcttggatagaggggtaatagaactgtgtgctagcctggttgtttttccttgcaccatctcatcaattactctggtttttttcttcatgtcttcatagcctcttcccgagaagtttgtggtaaaaggtgttgtggatcgtttttcagaagagtttgtggagaccagaagaaaagctttggataaatttctaaaaagaattacggaccatcctgtgctgtctttcaatgaacactttaatattttccttactgctaaggtaagggcagaaatttacatcctcttcgtccatattaccattcttggggctctttcctaaaagctgttttgagcaagactcggtctctacaaaaacttttaacaaatagccgagtgtgatgttgtgcgcctgtagtcccagctacctgggaggctaaggcaggaggtagcttgagcccaggagtttgaggcttcagtgagctatgatcgtgccactgcactgcagcctgggtgacagagtgagaccctatctctttaaaaaaaaaaaaaaaaaaagcggttttgatctttcagaagccaccttcatgagcaaatggttcactgtaacagggttgtcataaaattggtctttttttgggtgcctgtgtccattagcatgcttttttgcattagcaaatccatatagatggattctatgttagaatttaggagatctgtccccaccccatccggggccccacccacttgcagcagcagaggaagttagaatatttgctctgccaaaagcagagctaagtgtttccttaaacacttggcagtattactgggtgaggccagtctgaccaacaatgggcatggaacagaaggaacatttgagtgtttggtgagggttttcttcttaagggcgctttgagtgattacttgcagctgcattttacagacaaggaaactcaagttccaggagcttgtccttgttcaggtagcgtcactaggatctcaaattaggtctttgtggctactgaggccacaccgtccctgtgtatcagactgcctgattgttacttaacctgcaaccatgttcctgtcaggtggacatttgccagataaaacatttgggtcctacacagttgccagattctgtgtattcaaactcaagttggttgtccactggcctttctctgcacttccctgttggcagaactggccagaaaacctgaggtgctgtgctctcgctgtctgcagaaatggggtcacatgctcagaccctcctgctagcttccctctagtcccatctgtttggtttcaggtatcatattcccatgttcaggccatatgtaacatgttccatgttggcaagggtattgtggtccagatactttctagtttttcaaatctgcaaaattgggaaatagctatagataacattaggtgacattaaagacttcggagagtgtgccgttcttcactcagtggaagccgcatgacagagtcctttagtttttataacctcagttggcattgagccttattgatgacattccagttcagcatctctttttcccagaggctttccccccctacaggttggacaggtacactttttaaaactaagtatttcctggcaaactaaacctcaggtataattccttcaactcatactcaaagtagaatacatcctattctccaaaagcacaactcactttctcccccaaggtccattttccagaaagcccttaagcacattcatgtttactgaacaaaaaagaaaagggagggaaaagcttggacnnnnnnnnnnnnnnnnnnnnnnnnnnnnnnnnnnnnnnntttatctatctgtgggccaggcagtatgaaaatgacttaaaaaatataaggtccttatatgagaacacatggacacaggaaggggaacatcacacgccggggactgttgtggggttgggggaggggggagggatagcattacgagatatacctaatgctaaatgacgagttaatgggtgcagcacaccaacatggcacatgtatacacatgtaacaaatctgcacgttgtgcacatgtaccctaaaacttaaagtataataataaaaaatttaaaaaaaattagaaaaaatatatattatatattaatatataataaatatattaatatataatatataataaatataatatatataaaatatctatatatataaggtcctttactgccttaatcaaaatccgactccatatgagtgaatacaggagaggtggctttaaacagaacaaattttagccctaattcagtatcgcttgctgaacaaaatgtgctaaatggccttatcttttctttaaaaatttttaaaattgtgataaaatacacctaacatttactatcctaacaatttctaagtgtacagttcagtagtgttaagtatatttaaattagttatgcagctcatcttcagaacgtttgcatcttgcagatctgaaactctatgcccattaaatggcagcaccctattccccctcttccagctgcctcattttttcctttaacataccttgaataacttgatcttgttctgagatgagccacttacgtgttctgccttagggaatgcagagacgctcttccttttctttgtgatcacatgagtttatcaacaaattagaaatgtccttaagaagaagccaaaaggctgtatgtaatggctcatgcctgtaacacccagcgctttgggaggccaaagcaggtagaccacctgagcccaggagttcatgttcagtctgggcaacatggtgagaccccatctctatatattaaaaagaagcagcagcagcagccagtagtaatactgggagaaatggggacgctcaatagcaactatattcaagtcaatattttcatctttggcagagtgggtacagcaatcagatggatactgctgaataactttattcaacatgtaaattaacttggttaacggggacacgctttcaaagctctacttgaagcggagcctgtgcagtccagcgagcccatttgactctagtcccactcgtaaaaacgctgtctgcagaggtaattccaagaactctgaggcttcagttatagtcttgtgaaggccttgtgcctttgaggatgtttcttgtctagaatgtgggaggtcagaaggggagatggaatctttaggacactctctcaggcagcctgactctgaaggaaacgagagaggtggagaggaactagaggagattgctgctgtttttaagatgggtcagccttgggtgtattttacatgctgaaggattagaagttgaagatacagacaggagaggggataattggtagggcaaggccctcggttgggggaaggtatggataggtgttccagaaaaactctcaaaccatggttttcctctgctctcagacaacaacagttgtcatcaacacaggagaagacttctgtgaccaaattgcggggtgggggtgggggcgagattttccccaaacaccaagcagccattgccagctggatgtccaccagtttaatttgcacattatttgcctggacatagcatcagatcccacaggttgaggactcagtcctcaagtctgagagcttccagatctcggaccttaagttcaagcctccaaaacttctgaccagccagcttcaagttgggcttcccgtgacctcttctttgggttccattaatttgctagagcaattcacagaactcagagaaacacatttaccagtttattataaatgatatcacaaaggatacagatgaagagttgcattgggcgaggcgtgggggaaggggcgtggaacttccatgccctccctgggtgtagcacccttcaggaaactccacatgttcagctctccagaagttctctaaacccagctctcttgggtttttgtggaagcttcgtgacagcagcattccatcctccagggtgtagggagggaccttagtcagaaaggctggggaagattcgagtcctgccttggggcaggtgaaaggagggcaggggaaggacagagagattctgtttcctgaggcttaacacacccaacattatagtgaaaagactggaacaaggtctgtggaggttatgagccaggaaccgtggattaaacacacacacacacaaacacacacacacacacacacacacacacacacacacacacctacctcaataggaaaggctggatcaagagcaaaaatgaaggcctaaagaaggaagcgaagaaggaagtgaattcacgaggtgcctacactcagatactatagagacctcagcctgaaattgtacatcaaatgcggaggggctgttgggccatgttagccgcacattccacattctctgctctatcctctgcatcaggccacgtcaccagaaagctgtgtccttgttctgggttcctttatctccctctagttatacccttctaggtctggggattaacattctgtttgtattgagggtggatatgaggaacagacacctgtaccttctgtaaaaccattttgtaagctaccctttcagtaggtgacacaggacaacctgaagattgtatagattcctcttagtgtttgatgataggaggaagcttgttttatcaggcaggctaatatgcttttcttttttgcccaggctggagtgaagtggcacgatctcaattcattgcaacctctgccttccaggttcaaatgattctcgtgcctcagcctcctgagtagctgggactacaggtgcatgccaccatgcccaactaattttttttttttttttgtatttttagtagagacagggtttcaccatgttgaccaggctggtcttgaactcctgacctcaagtgatctgcccacctcagcctcccacagtactgagattacaggcatgagccaccatgcctagcctggctaataagctttatatttagatacaatgggttatgaaactcaacatatttccagttttgccttcaagaaatccagggttaaaatgttttgctgtttacagcatccatcctaggcctgagttttctagcaatgtttttctgccactgtttcctgctttccaccctttactccccttatatggctttagttggggtataaataaatgagtgatggatctcggaacctctgctcttcagttttgcttgtaaagacaacatagggtactttgtatgggagaaacagatacttaaaaaaaattatgttagaaacagcattgtgtttaaagggcagtgtgctcaggtgagtgaatttgattaaggattggcgttcagctctgctgaaagggatttaagtgtcaacctacaggagcctgagtctggtggttatgacgtccaggccagggtcctcctgtgaatgtgattagagcctctaactcagctccttgtttcccgagttctccatttccaaactgaagctgcttttagaagctgttttatttagtcctgcctatgtgagtgagtgagtgctttgagcttattcacatatcatcctcaggacctgaacgcctacaagaagcaagggatagcattgctgaccagaatgggcgagtcagtcaagcacgtcactggcggctacaagctgaggactcggccgcttgagtttgctgccataggtgactacttagatacatttgcactcaaactgggaaccattgatcgaatagcccagcggatcatcaaagaagaaataggtgagctgtctgttgaggtctcgattatgccctgcagccacattggcagaaatgccattcatgtgtgctacagagaatcaaactgcaaaatgctggagtgacagaactaggccatcttttgcttatcaaagaaatacaaggaggggaggagttacttgtgactggaatgtcactttgcaccccgtcctttgtcctgctgtgtcagccttgtgtttgcttttcccatggccagcactgctgattcgccaggtgtttcctcttttatgctctcttaactttagctttaaaagtggagacatagactcaactgcccttcatccatagggaacaataatttagtaaacaaacttagataccttttctggcagaaagatggttcagaaagatagcatggagacctgtgtttgccaaagttatgaccctgatgaatcttcagacttgtaattgactcacccaccccaccgtggttcattttaaacccactcctgcatgggggagttgccagggcctgtattgatccttcctcgtttttgcctccacttccttcccacccctctcggggccacctgctttgccacatcccataatgttgggatcttttatctccttacatatgcatggggcggacagacgtgagcagtgtaaatgatcgcactggcatgggaagcacgttgaggattccccagcagttgccattcatcggtcactaagccatgatgactgtgttctgttgcaacaatggcaagactcttggtgacaaatgatgggccagattttctttacgggggaaaaaaatcaacattttttttttctcatttcttgtacttgttccctctacttgacccactgatgataccatgtggggcccataggttttggagatagctgtggataccatccacacctaaggatcttgcagagtaaattctgatgggatccaaggggctgaggtggccaccgagtgatagagtgagtctgccagtgtaagaccacatctcttgtatcaaaatgtttcctaaaattccattgtttatccattgtgactgtttttgtttttcgttttttggtttttggttttttttttgagacagagtcttgctctgtcgcccaggctggagtgcagtggcaccatctcggctcactgcaagcgccgcctcccgggttcacgccattctcctgcctcagcctcctgagtagctgggactacaggtgcccgccaccacgcctggctaattttttgtatttttagtagagattgggtttcaccatgttagtcaggatggtctcgatctcctgaccccatgatccacccacctcggcctcccaaagtgctgggattacaggtgtgagccaccgtgcctggcccctgattttattttttaacctttaaaaacatctccctaaacctatatgaaactctgcctccattgcctgttaaaatactgcttcacactatgggtaggcgagtggttattttcttttttttttttttttttttttgacggagtctcgctttgttgcccaggctagagtgcagtggagtgatcttggctcactgcaacctctgcctcctgggttcaagcaattctcctgcctcagcctcctgagtagttgggactataggcgcctgccaccacacccggctaatttttttgtatttttagtagaaacggggtttcactgtgttagcaggatggtctcgatctcctgaccttgtgatccacccaccttggcctcctaaagtgctgggattacaggtatgagccaccaccaggccagcgagtggttattttcgaagatgtttggtggatgtggctgctactgcttttccccataaggcccattatccagagggatggcattcccatcacgggatggaatggattgatgtaacatgagctgtcagaggtttttaagcagttgtgctagaaatagtgttgtgtttaaagaagagtgggatcaggtgagtgaatggccaaagaaacacatgttcatgtagagagctcttggctgtggtgattactgagtcagtaatagcagcaactgctacccagccagattttaattagtttctgttccctgttcagagtaccttgtggagctgagagaatacgggcctgtgtactccacatggagcgccttggagggtgagctggccgaacccctggagggtgtgtcagcttgcattgggaactgctctacagccttagaagagctgacagatgacatgacagaagacttcctacctgtgctcagggaatatattttatactctgactccatgaaggtaagctggcttgcttcttgtgtatttgcatactttctttgtaatagcagttatcagaaagtaatggattattgcctgtttgcatgtgatataagtttccttcttcctgggtgggcaggatcagacacgtggactgacatcatggacatataaatggaacacatggtgaacgaagtacgtgaattaaacaaaaaaaaaagtttggtaagaaattcttactggtttctctgagagttcaagaagatataatgcctatgaaataagaacaaagatgccatggaaaagtaataattagagctcttggaagttaaaacatgattgctgaaataaaactgaataatcaagttggaaggtgaaattgaagaaatcttaaagtaagacaaaacaaaagttgctggaaaatagaacaaaaatgcaaaagtactgaaaatatgaaagaaaagagacataggggattaatcccaaaggttcagcatccgactgataagagttcctgagagaacagggaagactgagggaaggaaattgtaaaagaaataatacaagaaagtcccccaaagctgaagacataaatcgtctgattaaaaggacatgataattgcccagcaaaaggattgaaaagatcaccagcccaaagcatattattgtggaattttagaacaaaagtgatacgaatttgaaagctttttaaagcagagggaggggcagatgatgtataaaaggaacaagagtgagaatggctttggtctagcagcggtgaatgagaagaggaactatgaggacaaaaaaaatctttggcctcaaattctgtatgcagaatcggagtagagtgcaggaggaaatgcgccagtgcccacactggaaacttccccggcctgcacatagactggttggagaacatctcttcaggagactccgacgatgggggcactgattagtagaaaggcccagtctttatgaccaatagaaaaagatacgtggttcagtgttgaacattcccacctctaaatagcaccctcctgcttctcaaaggagacctctgaatgattaatctgtctttgggacaggtctagggcatcccatgaggaaagacctgaatagggactgacctgaattccagagagaaacctgtcagtcaacattgggttgtaaaaatgttaaaccagaaagatcgtagatccaggaaaacattgtacagcttgagaacaggaattaaaaaataatgaatcaactagttataaaaacaaattatgatggaaaactttaagcacatgccaaagcagagagaatagtgacaaactgccacatacccattctccttgttccgtcttgtcccatcaggtgtgaagggttgatacgtactaaactgtggacggtggaaaatggagcctctggtgaatccccttttcatgtgtgcgttataaagttgctaataaaacactttccaagccaggattgaatttggatctctcagtgaccagggaaatggtttgaatttccttatctataagttggaaatgatggtggtgataggataaagtcagatttgagatcattagcctgagaccactagttggaaattattggaactgaggctgtaagccaaaacttctggctgtgaatttgcagctcattctcttgtatcacactgacttttattaaaaaaaattgggatatacacattgaatttttgatcctatggccaaaacaagtatagaaagacatcctgactttcttaaaatgaactagaatatttcacttatcaaactaatggtatctgtgttttttgtttgtttgtttttttgagatggagtctcactctgtcatcaccaggctggagtgcagtggcacaatcgtggctcactgcaacctctgcctcctgggttcaagtgattctcgtgcctcagcctcccgagtagctgggattacaggcacccgccaccacacccagctaatttttgtatttttagtagagacggggtttccccatgttggccacccttgatctcctgaccttatgatccatccgcctcggcctcccaaagtgctgggattacaggtgtgagccactgcgcctggctgatatttctttttttttttgagacggagtcctgctctgtcacccaggctggagtgcagtggcacgatctcagctcaccgcaagctctgcctcccgggtccatgccattctcctgcctcagcctcctgagcagctgggaccacaggtgccccccaccacgcctggctaattttttgtatttttttagtgtcagccaggatggtctcgatctcctgacctcgtgatccgcccgcctcggcctcccaaagtgctgggattacaggcgtgagccactgcacctagccctggtatctgttcttaaaaataagtttttacaattcctggagtgtccgtggatttgtctcttatgtatacacacccttcatcaaatattctcttaaccttgccagatgaaaaatccaatgcatacacagcactgggatactatagtacaaattactctgttttttttcctgtggcaagtatgttagtacttagtatatatttgtatttgaagcacgatttaaaaatgtcatatagcaaggatttatctggcatctataaaacattacactgggagacatagcttgtgtaatttaagttagacatcaaagaaacatttgtttgctctttctttaccccccatgtgtggggcatatgtatggagtttcttgtttactgagcctgaaaaatcaggtcaatcaggctgagtgaatgggattgattgtacacagtcttgtctggggaagggcatggaaaagaggaagtgtggactggcagtctctgaaacccaagctctatccccgatagtagctgagctgagtccaattaataagaaacagggccactgctcctccacttttcaccaggaaaatgtctctgcagagtgccctgggcacgataggagtgattggatggcaaagcaaagactgtgtctgggattatcagggtctgtgtggctgggactaaagacaccaggagaatgatagatgtcttaagtggcttgcccaccttttcacattgctgctctgtaagaatttttaagtatattttcttcctccgagagagtcatatagttccatttccaaaatggctttctgatttttgaaacttaagtagggcagactttgctgtgcagtatggaaactaagcatggagcagaggacttgccacaggcctggctgtggcctgttctttattttttggagatggactcttgctctgtcgcccaggctggagtgcagtggcacgatcttggctcactgcaacctccacctcccgggttcaagtgattctcctgcctcaggctcccgagtagctgggattagaggtgcacatcaccacgcctggctaatttttgtgtttttaatagacacaggtttcacgacgttggccaggctggtctcaaactcctgacctcaagtgatctgcctgccctggcctcccaaaatgctgggattacaggcgtgagcccccacatcaggcctgtggcccgttcttcatcagctgctgaatggtcctcagagctgagaaagtcctgggttggttttggtgaggagttactggtgtggtgaggttctgtcagtctatcttcatcatggccttgagggaacctaatggtgagtgtttgtcctcatcatttggaagtagtggcctgtgccttaggaatttgaaatggtggatggctggtccctccctggatgggaaaatgccagggaaaagtcctgtcctgatggagctgtggtgggggttcctctctgagttcgaaagggcctttaggatcatctttctcatttgctcattgttgacacgaagaaacagacccttgtgagtaaatcttttctctgttgcatggccacaggactatactccttagtgaccaatcagcttgtagctgtgtgtttactacttgccaagaggcaaactaggtgactttaggcttttcaagcctggcctccaactgtatctctttcaggacaattgtggctaggtatgttctgttccctttggaggtagagagcatagaaaaatagggtcattatcaaggcactcggaacaaatggaacaatgtgagtttaagcagtgaacaatgagaacagcttgtactagaaagacggttgaaggcatgtgtcacaaggatatgtgtgcggggacaggaaggtacaaaaggttagttacccttaagcccagactcaagttaaatacctcgcagacatccacaggtgagcccttacataggatttcacatcctataaactgtgtgtgtataatgaaattagggtagtgatgggttgaaagaggccctcttgaagtcctcaccacttttctggcagtgccttttgagtattagcattgtcatgactaggccaaatgttggagaagctttattcctgaaggtttgggcaggactgtcttatttcccacactgccttatccatagaaggtggtcagcaagcatgtaattgaatcggacaatttggtaaatttgcgacacttacaaatatacaatgattgcacattgtacatcttatttttaagaggtttatctatgtcaatacgcatgcttatctcaggggtcttggtgaatgactggggtggggtgagggtctgaagtaagagtaggttgtaagggaaagccacatggaaaaggctgtggctggagacttggaagacatatgggagtgagctgcgcaagggtcggaggatggagcattttaggcagaggggagcagccagtgcaaagtccgaaagctgaaatgagctcagagtctttgcagatcagaaaggctggggagtggaacctggtgagcaaaggagtaagtggtaagcggtgaggtcaaagagaggtaggagcctggtcctgcagtagctttttttttttttttttttttttagacagagtctcactctgttgcccaggctgcgtgatctcagctcactgcaacctccacttcccgcttcaagcgattctcctgccttagcctcctgagtagctgggattacaggtgcgcaccaccacgcccggctaatttttgtatttttagtaaagacggggtttcaccatgttggtgaggctggtctcgaactcctgacctcatgatccacccacgttggcctcccaaatgcagtagcgtcttaaagaccatcttaaaggctggtaagagtctggactttattctaaggactagaagagaagccatttggttttatgcagggggatgacaggatgtgattttcactttaagaagacaactagtgctacagtatggagactagattgtagaggatgagagtggtgattgggaaggccgttcagaaggctgtcacagggagccaagggcagaaaactaggtggtggagcctggactgcagtggtagagacgtgggtggatttggggtatattttggatgatgggccaatggcacttgctgctgtagtgatgcaaaataagaaaggaattggggtttttggctttagcagctgggtggatcgcagtactgtttattgggacggggagggtccagggaggaacaggtggagcagttgggagtccactattttgggcatgtggaattcagaatgcctcctaatcattaaagtggagatgtcatggcagttggttttgagttagtctagagtgggaatagaaatttgggagtcattagtgtatgaatggtgtttaaatctctgagaccgatggagattgtatgaggagatgtgattgaggtgcgtagagtgtgaaggcctgcgcctgtggcatggtaatatttattgatctatcaccttaagacgaaagaacaagtagcaaaggagcccacaaaggaagggttggtgtggcaggagggaagaagaggattgcctccacgaagccaagataaatgttttaagaagggggcaaaatatatctgttggatttaataatatagacatcgttggtgatcgagattacaagtgtgaaatgtggatgcataagttttggcttaaagacaaagtttttcttccagttggagataacttctacaacattccgggttagtccttttcaaaagccaatttaaattgtcaggcggtttcttcagcctgcccgccccttccccacagggccacaaggtggcgccaatgagtcaaactccgggaacgcgaacagttggtgctttaggttggccatttccggtgcctttccaaaactgaaatgaagagttttctggaagattgatttgtcagggaaaaaatgtcccctttcctgaacaaaagagattatacagagtggctcatttcttgcagctaaaataatgtgaagaagcaggatgtgaaatatgcctgatttcaaaggctttaaaaaaataagaaaaatattaaaatgagaactctgagattcccagtaatggcagactgaatacacatttaaacttcaccaaaatgacactaaaacgattttgaaaaaagtcacaagcccacagacaagagcaacaggcaaggaggcaatagcagtacaattttgggaacggattgagagttaataagtactttaaatgactcaagctgattttgaaaccgactgtgggggaaaaaactgagaagccacctggtttacaccgcggaaccctccaaaaaggtcaagagttggcagcaccacgcccctctgggactgaggtagagctgaagagaagaataaatctagagtctgtttaagaattctagcttctgatcctctcctccctgctcacacaggggccacttccttctccactttggcagaactgggggtcgattctctggagggggcctctgtggagcaagagactctaggcacacttgagggtgttcagtgaaagattagtgatgttgagactcttctcctgcttgactctcagccttagatcttccatgcaaggaggaaaagagccttttctagaaaatctggacgggccaagagaagtgacccacagatactgatattggctggcgatggagaaccagggtggtccctcaatgaaaggacccagccgagtctcctatggagaatgtcaacaagccctctgtgcagagagctttcaatccatttccatggagtttccctcttggatgagtggacagacaagggtcaccagatatgtaagggaagatttgaatatgaatatcagaagtaaaacagagaagaaaaacctattgaatgaaacactgatggggaagaaaatttccagaaaaaaatgttaatattttccaaaagagaagatatcacagccataaaacagtaatttttaaaaattcagagaacaaagagctcttggaaattaaaaccataataggaataaaaaaattaatagaagagttagaagaaaaagttaagcaagtcacatatgaaaagaaaccaaaagagaattggagaaaaaaatatgaaaattagaggattagaccatctgaataacaggtgtgcaggcagagaaacagagaaatgggaagcatcaaagaagccattcaaggaaaaagaccagaagggaagaaataatgtatcactgattgtgtctgtgtgatgagattatgtatgacttctccccctcctttaaattttccaaattttgtgtaaaaatatattttaaaatgaggggataatgtgtggtttcagtgttaccaacattgccccaggacatctaactcgcaggtggtcctggtttccatagaatgaatatgtaaaaggagcatgttgaaaggggtaacctgaactcagtcatttaaccagagctagtgatatcaccagtaccagatcagactcattttcctgcctgcaggaaagtgcccttctagagggctaccctaagccacagggctacgtgcgtattttatttttattctcatttgttctttattactgaacacccattactctacatgaattccacttgggtcttgggtcgtcagccctggcctacaggaatatgaaccatcccatcctgcagttctctgtggggggtgagctgctcctgctgctttggtatcctcttccagccctgcatcctagctcccctcttccacaaagctttgaagctgaaaaacttggtgggcttgaagaggctttttggtagctgctgacctttggcgctggggctccttttctgccttttcccctcccgtagtttgtgagcccacagccttgccagggtcagacatgtgcatgagtctgagggtggggaagggatgctgtgctttcccgtagatgccactgtggtcttttttgggacaaatccagtgcagatgttgaaagccaaaccacaggatgcatctgtcatccaactcttccaaacattttgtcattgtagataaaggctgtttgattagtatttcatggatgacataactatagacctcttaatgactgttattaatttgttatatttggatgacagatattgtgtttctattgtttagcctttttattatagaaaaattcaaacatatcacaaaatagaatgataacaataaacccacatgtatcccagccgtcccgcgcgtatcccagccgtcccgcgcatatcccagccagcatcagcagttgcccactcatgactcatctggttctgtctctctgtcacgctgctcccaactcccaccctgtggtttaattttacacaaatcctggaatcatattatttcatacagaaacgtttagtacatatctctaaaatacaagcattcttttttttttttttttaaaaaggactacctaattatgtttaaatatccagttagtgttcaaatttccccagtttgtctcagacacagtttctgtttctttttccaaattgagatccaaacaggatctgtacattgattggtatgtttcttaaatattaaaaaatccttctttgtccatttatttttccttgtaatttatttgttaaagaatcatttgtcttctcttcattggaaaagagagatagtaaagttccaggttattaggaccacttgaaatcacaacaaaatgttctaatgttttaaaaaataagtgtccgagaggaatttattccatgtctgtaattaaaagtcatcttgtgagtgtgaggccctccttgggcaccctatgtatgattttgccttccccaaacccttggtacttcccttccattcctgttttatttttcctcctaatgcctagagttacctactatatattttacttgcttcttgtctgcctctcctctagaatgtaagctccacatggttttgtgatttgttctctgctgtatccccgtccctggctagatgaatgaagatgtatgaaggcagggcagaagcagggtggggaatgggtgtgtagaggagggcaggtggcgcgaggcatgaggagaaaagtctcactgtgcccttcgcctttttgatgtgtcatatcaatgggatacagatccctataaagttctgtgagaagttcagatgatgactctcttctgcttgtcactcaatgatggaggggcctctctgcagacgccggcttggtctcttggcctctttaccccactgccggctcgggcctcatctcacagccataggctggtttgaccaattttatcaatagagactgggctgggggcccatcctctcagaacatcaccaacagcatgcaaaggtgtcccaatgagggtggtggtagtcagcagtttgtcttgattcagaacacgttgcccaaccttcagcgtggttggattttgggccagctgcaaagccacatgctggaaggcagcaggaacagcctgaatgagccactgctgtgccatgagccaggtgtggccttgaacagggcccgccaccgtcccttagtctcctcatctgtagaatagggaagatgcgcgttcactctgcagggttgctgggagccttttgtgctgtccagtgatgcagggctgttagggcggatcctccagtcagcctgcgccagagggcagcattctggccacgctggataacactgagagacagagaccctgcctctcctgtgggccagggcaggcccaggccaactggagagagggatatggctggatctgcaggccccctcgtctgttttgggcatggggagaggagatgcttttgcactgttgtagctgagtggggttgatgcatctcctccccacccctcgtagtcccaggggtcttgcaaccccagcagtgcccccaggagcccccacgctgtgctggcattgttccagggcattgtcttaacagctttagttaggaggctcttgccacactgacagagtgtgtgtcactgggtcaactcagactccttcctagaagcgctagtctggatatgtggtttttttttccagtaagatgctaggcatcctgtgaagggaagtgcacaccagtgataagcatcccacatggcccctgccctgctgttccattgcaccttggggaaccacatttgcacgtccatggagaagaggatttttactactgctgtatcagaccaatagatttagattattttctgggctgtatgaagtccacaaaggactcttttttactttatagatttatgtcatccagtatggtagccactagccatatgtggctatttaagtttaaattcaaatgagtaacattgaataaaaatgtaaatccagttccccagtcctgctagctttgtttcatgtgctcagtaggcacgtggaggcagtggctcctgggttagtgtagattataaaacgtttccattatagcagaaagttccattgaacagcactgtaaatattcctactcaaagatgaatgagtgtggggagggaatgtcagggcacttaggagacagctgagtggcaattgacgaaaaattattgcaattttaacctcattttcatttcatgataaaacacttcctaaagcaaacttttcagaggaagacttgaggtttccggtattgacacattccattagaaggttgaacccacaacactctcaactcttcagttgcctgtcacctttagcacaggcagggatatggggtgcccgtgcttagccaaggagtgactccttcctgccttgactcctcacgctgctggaaggtcccctgtggggaaagtgcatgattagaaactttcatagcaatttatttcttttgagttagtggaaaagaaaggtctcatcactcttggtttgccacttgtgattctattaaaggaagaagaaagaaactcgttgatgaaacagacacctttctagaaggtctactgcaagcttttctgttttgcttggtgggttcatagcagcagagcttggactaagtgaggggagccccaggcacagatttacagggcattcactgtcaggtgccaaccttgtactcacatgggccaaagagggagtgtctccttacattttgcaccccgggtgcctagcttgcctcactcctgtcccatccagggctggctctcttggggcccattgagccttcactctggtgggctggctgcatggttctaggaattctggacttgcacaggtatagcccctttagcacatacaggcgcatactgtgtctgagcctctgtcacactgaacctctcaggtagggagtgcatctctctgctctttctatacctggaccagagtagaggactagtaagtggctaatgaatgaatcattgaacagatcagtccactaggggtccagtcagtgaattaaagagtgaagagttctcttagactttaagatttcagagaacatccagtgttgtagcctgcaaagctccgcatttctgcacagccgggctctggctgcacacagtgacgcggagagtccgcccagcagcgtgacaatggatgggtgctgtttcctccacttgcctttccctagaatttctttcctttcagcgtcaggttttagttactttactagaaactccagcatcaggagtggttctcctctcttccctcctttctcctgcttcctccagagtttctgccatggccagactgtcctaggagcacatggctgggcctggggtaggccttgatttggggaggcgtgggggaaaagaagcaattgcctgggggtgggaggcccctttgtggactcagtgttacatgcttctctcctctgcctcccacagagtgtattgaagaagagggaccaagttcaagcagagtatgaagccaaactggaagctgtggctctgcggaaggaagaccgccccaaggtcagggaagccacctgggaagggctgcaaagctgtagtctccctgctggtgctaagtaaattctcatctctagatctgtatgactaagagtggtcagtgccggctgggctacgttgatgatgttgtcctttttcactcccttttctgtcctatttctgcgagttcctagtgttcacttgggattgagttttccactgtttcctgggcctaatttttggttttttaaagacttaacagctctgccattcatcggcagttccttgctccataaaatggcattgcagagagaaggaaagaatagcctaaatcagtgctttcaaagtgtggttcataggcccacaaactatacaatccatgatgaggaaagtatagaagcacttggaaacttctataggaatttgatgttgctgcagaaccagttgaacacattgtgttgaacactcaaggcgagcgtgttaaactcgcgtgaggagttgcatgtggagcaagctgcgtgctggttctgcacggcaggactacagcttggtcgaattgggggaaaaaagccaacaaaaagtggccctttactccacagagttcgagcagcactaatcttgcttgtctaggatgccttctggctccagtgtttgtaactgctcggtaggttcacctcgcctgctgcctagacagagctgatttatcaggacaagggaattgtaatggagaaagagtaattcgtgcagaactagcttactggacactggagttttactgttattcaaatcattctccctgagcatttggggatcagagtttttaaagataatttggtgggtaggggcttaggaagtgaggagtgctgattggtcaggtaggagatggaatcatagcgggtggaagtgaggttttcttgctgtgtcttctgctcctgggtgggattgcagaactggttgagccagattaccacctttttacatttgtgggctaaatgcagacttttaaaatatatacaaacaaatcatcctatgtcatccctttaaatccctttgttgaaaggaaacttttaaaatatacacaaataaatcatcctatgtcatccctttaagtgagactgagacatggctcagcagatggcaccatgttccagaagatcacaggccagctcggaactcgtcagtggggctggccataggcaggcctcctcttactggggaggttgaggtgggaggatcccttgaggccaggagttagaggctgcagtgtgttatgattgcgcctgtgaatggccactgcaccccagcctgggcagcatagggagaccctatcttaaaaaaaaaaggttttggattttggggcattttgggttttcagactggggacgcccaacctgtgtaacaatgatttacaaggtatttatgttgtattaggtattataagtaatctagagatgatttaaagtatacaggaggctgtgcatcagttatatgtaaacactacatgattttatgtaagggacttgaacattcacagattttgatatctcagaagtcctggaactgatccccaccccaccccaccagatagcgaggcgacaactgtgtgtatgtatatgtgcatgtatgtgtaaaatttcattgattccataccacaaccatgaggtttaggtaccattattatccccatttgagagatgagcaaaccaaggcccactgtcacacaactagcactggtagagctaggatggtaccctgcagtttgactttagaattttgctacctaccattctatcactctgtctctttttggtttgtaagtggaaggtgtatttgttttcaaagagaggggtaagagtgaggaacgttagtaagataatagcagggacttgcatttcagggaaatggtttgacatcagagctgctggggatttcctcctttgccatggttcctgcagctgccgccatgccaagacatacctggaaaggaaccagctttggaatttgaaacccacacctcagaaatgacacaccttggctttgtgtagtgtctttaatgttaattgcatcacaggatcactgcagtggtcatctgaggcccgggggaaggcattgttctttccccgtttcatgggtgaggaaatgaggcacaaaggagctggacaaattgcccagcctctttgatgccgagtggctctccatcctgtgcatgtttgttgtgttgattccagcaggatcacccctagtgatctacaccagagcgtaaaggctgcatgtatctatggaaaggcagatgatgaggattggaactgtagtcactggcccagcgtatgcagctggcaccctccctctggttcctcctgccacaggctgtcagccttcttccatcctgtgtgtctgtcacaagggaggcgacaacagaaatgcagagccatgtgcacacagctgccctctgcctgcctatggccggccccactgacgagttctgagctggcctgtgatcttctggaacatggtgccatctactgaagccatgtctcagtctcatttaaagggatgacataggatgatttatttgtgtatatttttaaagtttcctttcaacaaagggatttaaagggatgacataggatgatttatttgtatatattttaaaagtttgcatttagccagcaaatgtaaagatagaagtcattcacagaaaacaaataactgcatgatttgacttatatgtggaatctaacaaagttgaagtcgtagaaacagagagtagaacggtggttgcccggactcaggatggggaaatcgtggtcaaaaggtacaaactttcagttacaaggtgaacaaaatcctggggcttccatgcaaaatgtgggtggtgatggatgtgttcattaattcgattgtgatcgtcactacacagtgtgtacatgtatcaaatcatcacgtcatatgcctgaaatgtatgtaattttatgtgtcagttaaatatttaaggaaaaatagaagtcactttttctggctagggaaggaaggagaaccaacaagttctgccactggcctagtttggaaaccgaggatcctgcattttaaagacgtcatgtatgtagttctgtaaatagcatctgtacaagctcagcactgaatacgagctttctcagaggctgatgctgtcatttaatatgttcagccctatacaggacacattcttttccaaagccaggagctgaaggtttggaataataggccgagttaagtcttaaccctgcctggcttgctggctgctggaagcacacaccaggcttggagcagtctcgagcagagggagacgctggttttgtgccctcagacccccacagctgcctgccagggctcctggcctcacattcctgcgggtctgggtgattcctgtccactccccgtgctgtggaaatctttggctgctgctgttgtccgccttcctggacactacttacccacatggctcatcctctcggccacaggaattcttaccagaggctaagggtttgccccagtccgtgaaaatgactagtccgtcctgaacacacatctgcgatctcttagcacactgtggctgggccatcttcaccttccctcttcctggtgggatgttgaaccatgccacattcactttgctgcttctttagcaattgtgatttttaaagacaaaatagactgtcctggtggtgtgccagtgaatgtaatgtaacagtggcagcagcagaaatcctttgctgcctttgggtctggggcagcagctgcgttggtgggcagaggagggtgcagttggcagcctgtccaagtccagcacggttggagcacaggatttagaatgggatggtcctgggttcaaaccccagctgcgccctagcttgcactgatccgctcctcagcctttgtgggcctcagttgcctcccacacatgagtgttgtgatgccataaagtgctcggcgtagtgtctgacgtagtgacagatgctccgttggaggagtctcccgtgtccacactggctgcagtaggaatgtgggcggagaactttgttttctgggtttgctgtcacatattttaagaagtcccttttctgaccacagtgttttagacattgtttcctatgtcctcaagcttcccctgcctccctagccctccacacacctgtcctccccgacagcccatcaggaggtttggtggatgctgaggaaatgagcaacttaaggttttgctgtgctttgcctgatgtggttgtgagctcacgaagccagagctgctgttgatgagatttttttttttaaaaagccagggaattcggaagtgggttagggctgattctatcccagggcctcggctaggtcttttgggaactgatggtgggagcgaggtagctcaggggactgtctcaggagtgccggggaggagaggtcccctggtatgggcatggtcagcagaagatccgagggagtctgggggcttacctcgttatcaggtgaaaccttgaaaaacttgcgctggataaggagggaaagttgatttttgtggagtcatggagtggcatcaaaatctgatcacttttttgtaacccaggggaaggaagtggcctcatgtctccacaaccttccctgtgaatttcaacgtggggtgatcctcttaggggagtcctaggacgtcttgtggggaaagagcacgtgctgagggcagaggatgcggaggcctctggagctggggaagaatggtggtgtcctagaatgcaaagttttgcattgtggttgggctgaggctggagaaagctcagcagacactgaggtggtgattcccaggcagatggagctttggattctggagacttggccttctccatgttaattgtgaggttggagaagcgacatgcacttacttagcaggggctggctgccttctcctgggcctgttgggctgcagcctggtgtacaccttagaatctaacccgccatggaaggtggggggcatcagagctcttacagaagataaggagaagctgaggaattagattttaaatggcaccgggagcatccgcaccttcgaatgacagtgagggtaacagagagggagctcttgccttttcctgtcttctgcgttggactcttttcagtgctaatacacttggtataactagctccaaaaagaacaaagaagggatgccagggagaaggcttcacagaattcctagttatcttcaaaaagtaaataaaaaaagcagggtgctgttttaggccctgacccacgggtagcctcatcctgggtgggtgccagatgaagaagtttaaatgggtggtgtcggagtgcagatgaggagagatgggccgtgtggaggggacctggggtgtcggtgttggggggctggcctgtggtgtgtgtggggggtgggtgtgtggtgtgtgtatggggagggcacgtggcatgtagggagggcgtgtggcgtgtagggagggcgtgtggtgtgtgtggggtatgtagtgtgtgggggtgggtgtggtgttttgggggagcatgggtgtggaggggagtggggcattggtgtgggaagtgtggaggtgtgtcgtgtggaggtgactgggatggaaaggtgcacagagctgttccccctctggttgagagaagagcagagggaaagtggaaattgggctctctggacaaacctcttgaaggctgtagaccttggacagctcttagaaccaccgggatagtgaatgttctagaatgggaaagacgtggtgggtagtgaagtgagaatcccaattgtaaactgccagcagggagacttctacatacagagctaatgcagaccggagagtggggcctcgtgtctgttgtttccagacccttctggcaagtgaggaccctcaccatggggcagaagaccaggtgcctccagccagagcaggcagaactcccccatcccctcagctgacttaagtcccaccgcagccaccctctgccagtgcggtggtttccatgtgacagatgggggcccggggtcaggggaagcgtggaacttaagtgccaaagtcaacaaatggtggagccggtatggagtccaagtgcatctggctccaaaactggtgcctttccccagggcgcgggccccagcagctgtgctccctgagggggcgccctgcctttcccgaggcaggcacggagagtgcgtgtggccttccctggggcttcactctcgtgtcattgcgcaggcaagctcgaggatctcttgctgtcagcctctctgctcctcatctcatgccctcacctctccctccctcactccccactgaccattctctgaagtttgtttttatctataattaaaaaagcattcattcagagagccactgactttctgtttgcccaattccatggcctcttttcaaacttgaccctgtatcagtgttttcttacctgttttcacctcacagctcaaatagacactgaaaacgcagttgctggaagctggaggtgaccagcctgggggctctggcttcccagagggcagaggaccaatctctctgccactcacacattgccagttagggagccctgtcccctgctcactcagcagcgtgtggctgtcactggtcctggagcctgtcctacagcagccacgagctcccctttcctccacactttgggattatatctgtcttgtgtagtctttggggatcttcctaacctactatcatcatgagagcagataatgtgacatctccaacccagctccaagaaggagacttaagttgagatttctgttctagggcctggaaatgcgtggcacatggaaggagctcagtaacgcatgcatgcatccatccatccatccatccatccatccatccatccatccatccatctatctatttatttattgctctgttgccaggctggagtgcagtggctcaatctcggctcactgagtaatgcgtttttaaatgaatgttgagtgaatttaagttactgtcccgttccccagcacacagaaatgcacagtcccatccacgtgactcttctgtcattgcactaacaacctatattctgtaatggaaattctcatgagagattgggaaccaaggtgaaaaatgcaattttgtcacctctgtataaatttttatcttttgaggtcttatctggtgatatttttccttggtgtcatgataagcaacacccaaccattagcagtgctgtgccatgtcaacatccttcagacgcatggtagcacaaccgtaacaatacctcagtcacgaaaattaaaacattgagataagaggaaatgctgagggtggtggcccacacctgttattatctcagcactctgggaggccaagacaggaagatcgcctgagctcaggagttcgagaccagcctgggcaaggtagcaagacctcgcctctactccagataaaaatattagctgggtgtgatggtgtgcatctgtagttacagctactcgggaggctgaggcaggaggatcgcttgaacttgggagattgaggctacagtgagctgtgattgtgccactgcactccagcctgggcaacagagcaagacctgtctcaaaaataaataaaaaataaaagtaaaaagaatgcttagtgttactggtcagtgaattgatagttacaaagacactatccaaaaaatcaaaggtggaagaatacatgcctgagcatgagttgccagcgctccccttcttcaagttggggaacttcacaagctggtcacagacagctcaccccagttcctctttttaattcttccatcctcttctaactcctaccacccctgggcttctctggctctgttctctctgattcaccacctcctctttctgtgcccgcctttctgccttcccgagtgacttttgctgagtcctttattaaccctacacatgctggcttctctgtgagttcaaaccttgggccctgcctccctcagccccacctttccctccatatatttaaacaagattatactgtggtaaaatatacagaatataaaatttgccatcttaaccatttaaaagtgtacagcttagtcgtgttaagcacatttacattgttgtgcaatcgatatctggaactcttttcatcttgcagaactgaaactctgacccattaaacaactctccattccccctcctgccggcctctagaaacccctgttctactttctgtctctatgactttgaccattctagatacctcgtatctagaataatataatatttatcctgtgactggcttatttcactcagtgtaatgtccttggtttatccatgttgtaatgtgttagaattcccttcctttttgaggctgaataatatcccatatatatgggacatacacacacatacatacatacacatacatatacataccacattttgtttatccattcatcagtggacatctgtgttgctttcatctttgggctactgtgaataatgctgctataaacatgtgtatacaagtatctctgagaccctgctttcaatttctttggatatgtactcagaagtggaatccagcaggatcatatagtagttctattttaaaatttttgaggaatctccatactgttttccatagcagctatactgttttacaatccaccaacaatgtacaagggttctagtttccctatgttcttaccaacgcttatctatttttttgagacagagtctttctctgtcgcccaggctagagtgcagtggcgtgatcttggctcactgcaatctccgcctcccggagaccagccaggctggtctcgaactcctgacctcaggtgatccacttgccttggcctcctgaagtgctgggattacaggtgtgagccgctgcacctggcctattttctgtttttgttattttttttaatagtagccatcctgatgagtgtgaggtgctatctcactgtggctttgattagcatttcactagtgattatgatgttgagcatcttttcatgtccttgttgactgtttatcttctttatttttatttttttgagatggagtctcgctctgtcgccaggctggagtgcagtggcgtgatctcggctcactgcaacctccacctccctggatcaagcaattctcctgcctcagcctcctaagtagttgagactacaggagcacaccaccatgcccagctaattttattgtattttcagtacagacagggtttcaccgtgttggccagggtggtctcgatctcttgaccttgtgatctgcccgcctcaggctcccaaagtgctgggattacaggcgtgagccactgcgcccagctgactgtttatcttctttggagatacgtttaagtcctttgctcatttttaaatttggttgtgtattcttttccataagcctttataaaagagctgtgtttggttttcttgttatctcaccccgctttgtggagggaggcatcactcttcccctggctgcaactccctcctttctgtgatctgtggacctgtccttcattctgagcctttggtggcattagtgccaccctagtcatccagactagaaacttcaggcttctctcggactccctgtattttatttctcatgggcagccagttgccaaatctgtcagttctgtctccaccaggttggtttactccatcctctcccttctggtgttagagccacaaccccagttccaggatgcccagtgcaatctcatgctaatatgtagtttggagatgattcatctctggtgtctaatgaaatctcagggtggagtagcattggcaaagggtggcataatgtttgggagaacatataataatatagtttgtatttggaagatgaaaacctgttttataacacatggaataaagcttgaggagctgtgcaagggatagattatcttttgtgaacagcaaattataatattgatactgatatgagctaacaaatgtttattgagcacttactatatgccaggcacaagtgtgtcacaggtgtgcaatgactctctggaaccagtgttgcaggggtaagaagaatttaccaagacaattataggtaaagaaaaacagatttattagaaaaagtaggaaaatacattgcaagagtgcaacaggcagatcagcaggaagggagctgactgcccagaaacaaaggcttgctggggatttcatagaatggtgctcgtgctgtgtactgaagagggcttcatgcagtgctgataactccaaggtcgcagtgagcaaacttgcatttttctattaactgagggtctggtgatagctgggtgcaggaagattgtgttattaatatttgtgcaggaaggctatgtgtcctggaccatgaagaaaagcagaagtatagcttaatctgccttctctttttgctttcccttggtcctgtcagcccaactcccccttcctaattaggacgctgtaaagcacttaacacatattagcctgtctggcctcatgacagcctagtgaggcggaggatattattagccagacagagaagctgaggccaggtcccaggccacacacctggtaagtggcaggtggggtgagcaagctaagctctggaagtttggttctagagctgtccactgcagctggaggaagtgtggggctttttctattctccaagagtgggcatgagttaactgggcctcaggaaagcaggactttgggacgagcctcaggttcctcatcccctgccaccctctgccagtcttgcgagctgcagttccctctccgtgccgctgtgggccctgtggcctgtgcacaattcctgcggtgggtcctggtgtcttctctcctctgtcccttgcgtgtaccgccactctggagtgccttccaagtggtcaaacatctcacatctgtcatctttaaagagccgcctcagtgctgtttcctccatgaggcccgatcttcccaggttggccgccccctccatcctcctcagcgtgcttatcacgggggctgcaggggaagcgacaacacttacgatatcttgcctcagtgtctaggcatgttcctgtttcttcccaactagactgtaggttacgggagacaagatttgtctgttgagacccaagcacttttgtattcctcagtgccaagcacagaatgtgttgtgaaactgagaagccaaatatttcccagaccgaggctcaggcagtcctaaaacccacagccgtggtttagaccctgatttttctgggtcagtcagagttcccatctccagaacacacctgggaatctttaaacctgggaatctttcctctgtgaacagtcctgattcagagaccctggctgccctcctctccacgtgtcctggtgaggttctctttccagggctttccattttctcctcacagcagaagtttcgttaagcaaacaggaagttgctcataggcaccctcaccccaatgcaagtgtgagcagtggccaggagacgggtaagggaactggcctgtgcctgtggggaggtgaggccagccagagacactggctcgctgggcatctttccattgaggctgattcctggagtgactctggagaggcaagactgggatactctggtttttatttcagtttttcctgaggtaaccaatagtaatgggtggtcttgggaggaggcaaaagagacttaaatcatggcatcagaagaaaaagtcagtctctgacctggtatggtggctcaaacctgtaattccagtgctttgggggaccgaggtgggaggatcactggaggccaggagttcgagaccagcctggacaacatagcgccaccacatcctacttattgtagagatgggggtcttactatgttgcccaggctggtctcaaattcctgacctccagtgatcttctgccttggcctcccaaagtgctgggaggcatgaaccactgcactcagcccagtattttttttttccctcttccagaagcttatgtgctttgaagaaggcctctttccccatcttaacagaaaaattccttgcttttaaatttccagagtgtctagttatctctctctccagctcatcctggtttcacccatgtctagttcccgtgtcaggcacattcaaattcacttgccttggccatgtctcttccctgactcctgtgttctacaaccatctccacgtggtctgtggagaagatggctgagtaccctgaaggtgtccagctccctcaggcctgtctttctcattggcatcattctgggtcagctccttgtccacgaggcttgggtataaacctcctcgattggtggaagtggactcccaggggtgagccatggcttggagacagtttggttcatgggccccagcacaccaaacataaaaggcctcacttgtggttgggatacatttggcaggtcgggggtttgacctggctttgggcctgtcggctccctggccaccatcagggctcagtgaagtgcttgagttaggagagagaagccagctttgggaagcgctgcagccacaaagcccaaactccagctgcacaggatggtgaaattcaccaaagcaaagtgaaagttgtgaaacttcaagtgacatagttcccttttgagaaagtcttctaaacctctttaagaaaaacttgaaatagcctgctgtatatttcttctttgaatttcaaatttttttgacatgcataagtaactttcctcctgttttctcagacttctctaactctccatttaaaagtatctgctattgggaaaagcataaacaagcctccagtttatttatgatgtggggttcagaggaggcagctggccagtagttgtcttattgcaattctctgattaatgaggaaaggcatcatcaaatgtcacagcaatggaatagttcatgtgatctgggagaacctacctcttctctagttccaatatgggacacaggagaatagcagggcaatacaaatgctgtatatttgcaaagtctgcacacactttcaagtgtggatgagtaaatcctaaaaggaaccaaagacatatgagtctgaattgcaatgtttcttcttcctgtgtgtaaatgggggtgtttcccccacgagtctctgttgtgtttggatgggtttgaagatctgggttaggagagccccttttcagagctcctccttagacctgaaaacccaaggttttgctttcaaataaatgcctccagaggagggagcgtgttgatagcattttaatgtagggctttggcctttgacaaatgtgtgctcagaggagctcaaggcaagagatgccagttttgtgtgcagggcacccatgtgtgcctcccttttccaggtaccggcggacgtcgagaaatgtcaggatcggatggagtgtttcaatgctgacctgaaagctgacatggagaggtggcagaacaacaagaggcaggacttccggcagctactcatggggatggctgacaagaacatccagtattatgagaaggtaatgagtgtgcccaacaagactggtttctaatggccagagcctttcacatgggcctaccagaaatccacaagctgggaatcctgctagtctcatctccttcccttattttagctgcttagtcttggctcccgcttcatgcccttgcccaaccatgtggctgcagtgctgggtttggcagcagagggggtgctcacaggggtttcccttgcacatgctgctggggaagcagcccattggtcttccatgctttctgggcctggcactggttgcttcccagagccagtcagaccttcagcacagtgatgctgccaccgaatggaggctttggggttactttactctgtgttggggttctgtacacagggtcccttcagtttggttgtgcagtgaacccctttggtcatctggtgaagcctatagacccctcaccaaaatactgtgcatttgttttttaaatagacttcaaaatattgattttaaatacgtaaaataaagggatgtaggattacaaaggaaagcaattctattaaaaacttttactcatggatccccttgaccaggttaagcagcgcacgcacatgcgcgtgcacacacacacacacccacacaccccactaccaccaccacaccccacacacacactacacacacaccacacccccccacactacacacacaccacacatacaccacacaccccccatactacatgcacaccacacaccccctacacatacaccccacatacacaccccacacacaacccccccacacacgacacccacacaccacacccacatacctcacacaaccctcacacacaacccccacacacaccatacacacaccacacacacatagagatgactcttatcaggctacagcccagtcccctcaatcaaggtttgcttgattcgtatgtccagcaaaccagtgcgaggccaggtgcagtggctcacgcccgtaatcccagcacttgaagagtccgaggtgggaggatcacttgagcccagctcaagaccagcctaggcaatgtagtgggactgtcgttacaaaagatacaaaatgagccaggtgtggtggcgtgtgcctatagttccagctactcgggaggctgtggcaggaggatggcttgagccaggagttcaaggctacagtgagtcatgattgtgcactactgtactccaacctgggtaacagagttttttgatcctgtcacgccatatatatatatatatatatatatatatatatatatatgtatgtatgtatgcacacacacacacacgtatacacacatatatatacacacatatacatacatacatacacacatgagtgagtgtgtgtgtgtgtgtatgtatgtatgtatgtatatatatatatatattgcgatagggtcaaaaactctgttacccaggttggagtgcagtagtgcagtctgttacccagagttcctttcttctgtaactcccacaccttccctctgctgttcagcggccttcctactactacaaaaccaactatgtcaaatgtctctgttgctccctttggtaattaatcccagcgttcctaaagtcctggtcccaggaggacccaaccctggtcttaagtacgtgtttatctgtcttcccactatatcacaggcagggccactgtcttggggcctggtattgcttctatacatatttaacaaatgctttttgtgcacttgctgtgtgcaaggggcagtgtgtaccaaattgataaacagcaggattcctgccctgtggagggtatgtgttcatcaaaggagcccacagcttcagagtgagataaggaaaagaacgggaaactgggggagaaaataccagggggcataatgcagactaagggtgggaggggcaagtggagtggtcaggaaaggccagtctgaggaaatgacatttcatccgagtctcagagacagaggcttggaaaacatatattccaggtataggagacaacatacgcaaagtccctggggcaggaaagagtttggtacatttgaggaccaaatagaaaactggtatggccttggtttatcatggctgacatacaaagtccattgcagatctgaagtgatggcctagggagagagcaggacctggaatgccacagaccccagatcatcttccgtatataaggtgggcttcagagtttagcttcctctctaacctcagagtcaccaaggaggaatcaggaagcaatttcaccactcttctttctggcttgacctaggatgcctctctcctcctccctcctcagaacttctcccacctcctgggaattcctcccacctcctcagaactcctcccacatcctcagaactcctcctgcctcctcagaactcctcctacctcctcagaattcctccccctcctcagaactccccccattagaattcctcccacctcctcagaactcctcccacctcctcagaactcctcccacctcctcagaactcctcctccctcctcagaattcctcctgcctcctcagaactcctcccacctcctcagaattcctcctccctcctcagaactcctcctccttcctcagaattccttctccctcctcagaactcctcccccctcctcagaattcctcccacctcctcagaattctttctccctcctcagaactattcccacctcctcagaattccttctccctcctcagaactcctcccacctcctcagaactccccaccccctcggaactcctcctacctcaggattccttctcaggattcctcctccctcctcacaactcctgcctcctcaggattcctcctccctcctcagaactcctgcctcctcaggatttttcctccctcctcagaactcctgcctcctcaggattcctcctccctcctcagaactcctcccacctcctcagaattcctcctccctcctcagaactcttcccacctcctcagaattcctcctccctcctcagaactcttcccacctcctcagaattcctcctccctcctcagaactcctcctccttcctcagaactcctcctccatcctcagaactcctcccacctcagtattcctcctccctcctcagaactcctcctccttcctcagaactcctcccacctcctcagaattcctccttcctcctcagaactcctttcacttcctcagaattcctcctggctcctcaggattcctcttcagagctcctcccacctcctcagaactcctcccgcctcctcagaactcctttcaccttctcacaatttctcccacctcttcagaactcccgctcctcacacctctcccaccccctcagaactcctccccacctcttcagaacctctccccacctcccccaaacccctcctgccttctcagaacccctctccacttccccaaaactcctcccacctcctcagaactcctccctaaatgactcagtacaaagtcctcctccacccctggggctgctactgagaagccttatgtgattaacttgccctctttatgcaagagactttccaaagggcgaatcatttctgctctcagaggacaatgccagagtgttctgagttcttggcctttcacaaggatctgggatgaaaagaggttggtgtagtggagagaacatcagcgtgggaaccatgagctctaccatggacaagctgtgtgtctgggccagttatttaacctgagtcttgtcttccccatccatgaaatcagtgtgtatgtgtcgagtaataattctccttcatagaggagctgtgaggactggtgataactaatgtaaagtatgtcaccatgtttggacataataaaactcaataaacactggcttccctcttccatattcccttttgagagattcaggtgtggcccaaacaagcaaacttgaggttggtgaggaagagtgggctttccacccgctccaagtcaggtgcctggcctgctccaactatgatttccatcctgcataagcgccacccacacctggagcagtgtctccatccctgccgagattctagggactcttcaggggtttcctgcttgggcttttttctgcttttttgaaaggaaaagaacttcctccagtaaatccatttccattcactggatctgagctttacagactaacatgaatgcatttaagccttgcagagatattgctgtctttcataaagatggggtgacgcattcaaaacaaacacctgttacctccccgtttgtaatagttatggatgacacatgcaggcatcattagacaaaggtaacccagcaggatcgacaacgaaagggtaggtcagagcagaattgaagctgacccgaaatcggaaactcaaagctgatactgtgtgtgtatgttgtcgttccagtgcctcatggcgtgggagtcgattattccactactgcaggagaaacaagaggccaagtaaagttctttcttgggacggagactcttctacctacacagggcctggcaccctataccggaatgtccctgcagtgccagagacgcagtgctgggaaaacaaccacagaaacatctctcctttgtgtatttttccctcccccacctttcaccccacagtggttttcaattagtatttattccatggtggagtctgtgaggctagaatatctctcagcaagagcagcatacctccatgttatgaaggcatctgttcagtgaagcactacgaaaatttgaaaccaagggacaagacaacttgcagctgacgctctgacatttcatgacagtttcctctttagggacagctgagttgccagttgtgggagagaacccggggcctgcttttcaaggatgaggaggaggcaggaacagaaggcagctgctgctttctgtggaaacctggcccctctggaattggcctctgtgggcattgacttgtcttggcctaggaggcattggtgcctccctggcaagtccttaacgtacagtacctgtagctgtgagtgtggcctgctgcctgcttgtgatgagtgataccgtcttactgtttctgtttcacatagggacatttaaatcaatgtcaatgtgcgtccatgcttgagtgagcaagccagcgtccttgtcctcctgcaatgcctttgggaagctcaggggaatgctccccaagcttgtttctgacactagaatgcaacagattggaaactttttgtgtaaaatgaaaaaaacaaagtgctgttttttttttttttctgtgaaggtcttcagtgttttgcttgttcactgtcatcagagcagggattagacctgttagggaatatctattgtcttgaagtcagagtagctccccattgttgagatcagtgggcatataccaagctccacccccagtgtcagctttgtgcaatttgcctttacctcaccaaaaatacctactttaatatttcctcctgtgtcctctgaatgtctgggcgagcttttggtgagagggctggtatgtcatgttgttatgatacagtcgaaatttgtcaatgcagtgtgaatgttctacataaagtgctttaacccttaacatttcctggtcaggaaggaaaatcagtacctggacgggcctcgaaaatgacaaatgcaacagcgagccctttgtgtccagctaagctaaagtctcctcagtgtgcagccagattcctggggactgctgagtgtggttacaggctgcatttcagacaatgaccaggtttacttttcagatcacaaagcaaacagtcaccaaggatctgtcttccaactcttttttttttctgctgaaatgaagctacatgtcatgtttgtgttctttcatctgtggctcatccctgtaaaactacgaatctgagcctcaaataagcagtagtttttttgttgtttatttttaatgaaacagctgtgttaaggcgctgcttcagatgcaagttcacctggaaatactggtcagcgggcagcacgtcaaggtcacttaagcccacttttaactgcaggtcatcctcgcatcagccaaggctgtggtgctgttgatgccgcagttggacagcataggacggcttggttctgtttcattgtgtttgacaatgttgcagtttaaatgataatgtttaaatcaattggtacttgcctgtagtgttaaaccctatttgtgccattctcaagtcctttgatgtgaattttcagtttggtacagttagaaatgactcattgatgcggacaggtaagaacaacccatgtacccccgagtgattgcatgctttattctacctctaagccatcgtgttggcgtgggtatggacgcctgggtctgacctgacactgtgctgggagaatcaggatgtgtgtctaatggcgagctgacagccctctgctgatatttggcagaaggcaccagaccagcccagcagcaaatgctcatctttgggaacataggaagctttaccttggggaaggtatgctttacaaatgtccagtgtaatgaatgtttggaaaaaactggagttacaggaaaatgaaatctgactatctgctagttgccaaaacccagaaacattcctgtgtaatggttagttgggaaagaaggcagcacttgaaaaaatttaccaggttcctcactgggagatgtgggaaggggcgtgggacgcacgcggtcactccctctcctagtgagaggcagatggctggctctgaagggaggcaggcaccgtgggatttgggcttgctctgcttggtccccatgtgatgccctgtgctgtaagatatcagaaagacctggaacaaggcaaactttatgtcttcctggcatgttattgataacagagccaggaagtccagtgtacattacagattttctgggagaaatagtccttccagagaaaggattccttcccagcctccaggctggtgtctcatgaggtgaggaggctggcccagaaggaaggggacgttaggtggtgaagcaggctcccctgggcctctgagggccagcagtcccaaccatttgcctcttcgttttgaccaagcacaaaagagatattccctagaagtgtcacacggaggcttctgtgccaaagactgccttgtagaggtctcatcacctcacacttcttgacttcacaaaattgtggccctgagatcagtactcctctcttaagtatttattattattattatttactttacctcaagcagacagacataggttttgaggcttgaatacatggcagtggaatacaaggccctccctagcagccgccccaggcctggaaagtgggagatttcattcgcccgggttaaaaatccagaggaagacagaagagaggagtcctaggaactgagcagattttagagacgcaaatgatgtttaagagagccttgtgatttgtagcaagcatgggcactgctttttcttactaatgtggtagatctacacgaacattctaggctgttctgctcagagcgaggaaccactgctcctcaatggggagggaacataccacccagccaggcttagcattgggttttatcctttaataaaagttttataatgaatcctgttcaccttaaagtgtgattatggagatgattggctccatatttcaccacgtcattccttcaactcaccagacacctttctttagttgaaataaaccagcatgacctggagatcatggtgactgtaagctaagtctgttttcatgccagatttcagccccacccagagtgtgctctagatgttgttgatttgaatggttttcccagttcccactccacatggggaagttgaatgaatgcacacctgctgctcacttcttgtgaggctgccttttgtgatcaaataacaggaagttctgctttagaggagggcacgatgaccatgtggcagtctgcaagtggaattttgggatggcagcccgaggaacatccagagttactgtgtgacttggtcctgccattgttagctttgaaatcacaggcattgggctctgttttgacaccattcattggactgcgggacagtcattctttacgttctctcttgagctggtgagagaggaggaagagggaagtcaagagcaacctccaaggcctatgtcagcctcttctccttgggtcttggggtgggttagaactgggttccagtctggccagatgggttgctggctgcactgagggtgattcttctcagaagatgggctgcctgtggtcaggacagggcataccagtctggactccaccttcccagacacctactttaaggacctgtggaaactgggtgatccaattatagggctggggcaaccctgctttggccaccctcatttacaaacttaggttgggagcttgggtttcctgtctcacttccaaaagccttcaagatggcagcagatggacacaccctctcatttcttgtgtcttgtctgtcagatggcaggaggcctgtatcagtaaatttgaggaaaatgttctctcctgggccagcctcacagcttgcgttgggtgtgttggaattgttctcttcggccttgttctgccttgtgatcttttcaattcagtgaataaaccaggtatccattttttcaccaacccaccctgtagattgtcagctttttgtttgagagatgcctggtctcacagttacatgtatcagagtgtgtgtaagttgtctgtgttagaaaggttggggtgggggctttgttgcaggggattagactgttctttcttcatcataatttgagatacatcctgagtatgactgtctaaccctttctgtgtggcagaaaaatatgttttccaggtagtttttactactacagagagtctgtaaataagtgctttaaaaaaataacaaaccaataagatatttgtctcctatataaacattctgtgtatttagcacttgaaaatcaacaaatccagaatttaaaaaaatgccacagacttttcaaagcccaactctacttttttgagaatttgtccgtacctactaatatgccttattcttcttcacctagtgttttaaaagtcctgggtagaaagagttttagaaatgtaatcagttgttcagcttcaataatatagagatctaacatagtcagtcctcaggccccctaaagaaacaagcaagaaagtgagggccatcactagggttggctttggggaggggaaaactaaggactgcttttgccaaatgatatttttgataatgtaaggaaacacagggaccacaaaacctttttttttttttaagtgtgaaagattagtgccttttggcatacttttgattttagaggatatagtatcggcattgacaaatcacgtagaaacaaagaatgctatagatgacaacagtattaaatgttactcctgattctgcagaacagcttttgaagatactggggggtatcttcaagcctcagagcagcttgtttcagatagaaattctctatgggttgaaatgccaaaaacagaaaacatgatgttgactcatgtaatttagtccattttagcagagcctttagtgttaacaccagtggcgaggagcattgcatattctctgtcagcagcagcactcccacaccaggtggttctgggctctctgtaggctggtcctagtaggtgacacccagcaacacccctgttggacaggattgattgttcgcagtcttagaccaacacttcagtcagaaatgttactgggaggaggaaaggaaaatcactttttttcctccatgtggaaatgaggagagaggaaagtggattgcaaaccaaaatgtgagtcagtgtgatgaagcagtggctctgtcatctcggcctttatccaataacaaaccagcatctcttaaaggcgcttttggcctagacacccctgaagtttggatgaagtctggtggattccctgtctgttgtatttctgtgtgcctgttcccttcattgctgtgagttgggagtgcattgagagatgatgtccatctgatatattcctgtgaaataaactgccagcaaactttctaacttgtattttaactgttaaagaagagattaaaaacttcggctttggacatgtccacattatggactgtcatcttatttttaaaagtcattctttacgtttaaaattttaaaataaaaaccttctgaggtattgatgtagtccaccgtgtaaatgttaccttctctccatgctgccattatgccaaaacaaaagctgtgataaaaaaagtgcttgagagagtgtgttgataagaaagtgatttatttacagatggaagtctttgtttcatgaagctaccaaactttaaaaagaatgtcacccttttttttgtttgttatggaaaccagagattgtaaaatggaaaaagaatcgtttttttgttgactttttgatgctggcacgaggtttttgtccacttttttcatatatctgtgtataaaaaaattgttgtttactatggaattagtattacattttgaggtaaacaaaagaatttgtattgcttgataaatattagcttgtaaatttaaagtttctttacttcaattaacttaaaggaccaataaacccataaaagatgctttctttatctggagtcatgtcctcatttgtacctttttgtaaggcagaaaaacatgtgtgcctatttttctgttttcttattttctctttacaagttttcagtttgcctgtaagaatcaagacatacagagcgacaggaaaaaatatatataattgaactatttttattcttcttcacttctttataggcccagtttaccctcaatttaccctcttctacatcttccacatctgcaccaatctggggagatgaagaaacttcctagtgtagtagccatcatgactggcaggcaggccgacagccagctgaggtatttactacatgaaagatttcctgtgttatcccatagcaaagcacaacattatattctgcatcagggccagttaagttgacctgatgatggtaatgcattgaacttgagtatatttaaaatagtgctcaacttgacttactttaagactgcagtcatacaaaataaggcagcaagctgaataagacgtggatcatggatcaaatctcagcttttccacttactagctatgtggctttaggcaagtcacacttggctgaatatttagtattacgatctttgagatgaaaacaagacttccacatggggttgtcgataggactagcaatatggtatgcaaagcacttaaatgtcaggcagcttctcactgtgatagcccctttctaaagacttcctaatttaaatattaaggctattaggatattatccttaaggatatggccaatttaaatattaaggataacaatccttcatgtatgctttgccagtttttttgtttaacaggatattcttttttttttcttttgctttgtcacccaggctgaagtgcagtggcatgatctcagctcactgcaacctctgccttccaggcccaagcagtccccccgcctcagtctcccgagtagctggtgctacaggtacgtgccaccatgcccggctaatttttttatttttcgcagagacggggttttgccatgttgcccaggctggtattgaactcctgagctcaagcaattcgcttgccttggcctcccaaagtgctgggattacaggcataagccactgtgcctggccctgttttctttttaacaaggtgatggaaataaaatactgaaggacggtgtcagattgaaggcctgaagaatggggaggaataaattccaaaagccatggcaagaagtgataaagggaggtgaaaatagccgatttaagagattcttggggggaggagaatggaccggagatgactggaagattgccagcctgggatttggaggcgatgccattagctaaaattaggagagaaagacagaatatggaggctgggcgtggtggctcattcctgtaatcccagcactttgggaggccacagcaggagatcacttgagcccaagagttaaagaccagcctgagcaacgtagaccccgtctctacaaaaattaaaaatcaaaaaagatggaatgagcttaggtggtggggtgtgagaaggagaacttggtttcgctttaggtttga

SEQ ID NO: 854 - DNA, 1140 bp, Homo sapiens
ggatctcattttgcccaacggtggtactccagcaggtacttcaagtccagcttcttcatcttcccttctcaacagacttcagcttgatgatgatattgatggtgagactagagatctcttcgttatagtcgatgatcccaagaagcatgtgtgtacaatggagacttacatcacctataggatcaccaccaaaagtactcgggtggagtttgacctcccagaatattctgttcgtcgaagataccaggattttgactggttgaggagcaaactggaagaatcccagcccactcatctcattccccctcttcccgagaagtttgtggtaaaaggtgttgtggatcgtttttcagaagagtttgtggagaccagaagaaaagctttggataaatttctaaaaagaattacggaccatcctgtgctgtctttcaatgaacactttaatattttccttactgctaaggacctgaacgcctacaagaagcaagggatagcattgctgaccagaatgggcgagtcagtcaagcacgtcactggcggctacaagctgaggactcggccgcttgagtttgctgccataggtgactacttagatacatttgcactcaaactgggaaccattgatcgaatagcccagcggatcatcaaagaagaaatagagtaccttgtggagctgagagaatacgggcctgtgtactccacatggagcgccttggagggtgagctggccgaacccctggagggtgtgtcagcttgcattgggaactgctctacagccttagaagagctgacagatgacatgacagaagacttcctacctgtgctcagggaatatattttatactctgactccatgaagagtgtattgaagaagagggaccaagttcaagcagagtatgaagccaaactggaagctgtggctctgcggaaggaagaccgccccaaggtaccggcggacgtcgagaaatgtcaggatcggatggagtgtttcaatgctgacctgaaagctgacatggagaggtggcagaacaacaagaggcaggacttccggcagctactcatggggatggctgacaagaacatccagtattatgagaagtccattgcagatctgaagtgatggcctagggagagagcagg

SEQ ID NO: 855 - protein, 362 aa, Homo sapiens
DLILPNGGTPAGTSSPASSSSLLNRLQLDDDIDGETRDLFVIVDDPKKHVCTMYIYITTKSTRVEFDLPEYSVRRRYQDFDWLRSKLEESQPTHLIPPLPEKFVVKGVVDRFSEEFVETRRKALDKFLKRITDHPVLSFNEHFNIFLTAKDLNAYKKQGIALLTRMGESVKHVTGGYKLRWLEFAAIGDYLDTFALKLGTIDRIAQRIIKEEIEYLVELREYGPVYSTWSALEGELAEPLEGVSACIGNCSTALEELTDDMTEDFLPVLREYIKDSMKSVLKKRDQVQAEYEAKLEAVRKEDRPKVPADVEKCQDRMECFNADLKADMERWQNNKRQDFRQLLMGMADKNIQYYEKSIADLK

SEQ ID NO: 856 - DNA, 22343 bp, Mus musculus
  misc_feature (1)...(22343): n = A,T,C or G
tcccatgagattgaagcacagcgcgcaagtgaaactgaaagatatattggagacccagcctgacagggtgagcctgtaatcccagctgttctagccgatgaggctgaagggtcaaaggtttaagacctgcctggactactaagcaagttcaacgatagcctggtcaacttgatgggatcctgttccaaaatgaaaaatagcaaaagggctggtcatgtagcttatttggctagcatgcacaaggccctgggttcagtctccagtaagggagaagggggaggggaggagataggagaatgctcagtggttaagagcttgccagttatatacaaggtgctgagttggatcctttgcagaaaagagacaggaagaggggaaggagtacagagggagggggtaggggagagggggagggagacagaatgaatatcaaatatcaatttagtctatgaccatactaccctgaatgtgtctgctcctgtctggtctcagaagctaagcagagttaggcctggttggtacttggatgggaagctatcatatcggttagaccagtgatgctcaacctgtgagtcacaaccctctttgaggtggtctcctaagaccagtggaaaatacagatatttgcattacaattcataacagtagcaaaattacagttatgaagtagcaacaaaagatctttttatggctgggggtcatgacatgagaaactgtataaaagggggacagggtcaggaaggttgagaaccactgagtgacaggcacagccaggtcacatctttagaaagaattcagaacttcacttttctctcctctcattctattcttcctttcctctccctctctagcgcttccttcttcctgactgctcctgttctttgagacagggtctaactctgtaatccagggtggactatgtactacaactcactgtgtagcccaagctgccctgaacaccaaaccttagcaaggctgagactgcagagacatgccactacagccagcaagagataatctttatttatttatttatttatttatttatttatttattttggtttttcgagacagggtttctctgtgtagccctggctgtcctggaactcactctgtagaccaggctggcctcgaactcagaaatccacttgcctctgcctcccaagtgctgggattaaaggcgtgtgccaccacgcccggctgagataatctttttatccttccataaacaaagaggcagtctcaaacggtttttaactgaggaggtgactaatatgccacaactgattcaggattagataacctggctcccggaaaaatgactgaagaacaagagattgaagattcccccacttctgaagttcaggagattgagccagaaggtccttcccatgctaccatgctaggcaactgctgttcttgcggcctgtgtctctgagagcattcaccactctgttctctctctctctctnnnnnnnnnnnnnnnnnnnnctctccccccccctctctctttctctctctcacccaaatttcatattactgtggaccctctcccttgtaaagcagatactgcaccaggtatgatgatatatatactcttgtcatctcagcactgaggagtctgagacaggaggattgtcacaatgtcaagcctgggttacacaagacactgtctctacataaagacttaaacagttttatgaattttaccttctaaatcctctccaacccatgatttcctcagcttcagcccccacactttaaacttgcatcacctctcatctcaggacagtgtgagtaaccccccctctcttttcaattgcttcctctgacccccaaagggtcattcaaaatgttactgtgtttgtatatttaaaacctctttttcatttctcggcaactttgtacttgatttgtttgttttgttatttaaaatcaagtattaaccagtttagaagcaggtatgcacatgtgtggcagcatatgtgtgaaggtcagagggcaacttacggaagtcagctctcttcttccaccatgcagattctgatgagtaaacttgtcagacctggcagccagctcctttacccactgagccatcctgaacacactgttcatttgttcctctcttcacctgaccaactgctactcaccatcagagacagtttaaggctgtttcctttgggagatgttcctacatagacctctgttcctttccagtcagactactactatgccttcccataacattctatactattatcacactgaggtttaactgtggagtccttgaagaagtactccatcagatcaggttgtgtcttacaatctgttcttctgaccattgtttgagccccacactttgggtgctgtgcaggatgccagggatatagctagagttacagtggttatgtgctaccccatgtcaatgctgggaactgacttcagatcctctgcaagagcagtacaggtcacttttaacatctctggccccggggttccatttttttacactcgctgtttctgtactttcattcttctttgaagttctgttcatatttctaccattcactttcctactaaatgcccctggcattgcagaagtccggtaggcatttcacagagtaccttccttcccatgggagtcacagtttctacttcccttcttcctaactcacatcccaaaagtgggcagccttccttctcactgtggtttgacctgcagttttactggttttgttatttattctgagccagggtctccctacccactccatgttggcttgaaatagcatacccatcttcctcctgcctcagccttcagagtgcaagcaatcctgggattaagggtgtgtaccaaggggctggagagatggctcagcagttaagagcactgactgccctcttccagaggtcctgagttcaattcccagcaaccacatggtggctcacaaccatctgcaatgggttcgcatgccctcctctggtgtgtctaaagacagctacagtgtactcatgtactcatataaaataaacaaataattctttttttttttaagggtgtttgccacctcacccacaaatggaaggcctcatcctttgccattctccactctgtcagggaactgatgaaaccatctcttttctctgccatagcatctggtagagctgggaagggagattctgtagcaggctcttttttcagtcctttaattcttttcatttctagcactttccggagcctaccactggccagttaagtattactgaatgcattagtcataaataaataccctgtccttccaaattaggttgtgggtgtggtttctaagaggtttctacatcacaggaaagctacgaacgagagggagccagaaacatccaatttgggtctaggggcgaaaaaatgggaaggtacacttttaaaaagtatgtggaaagttaaaagtgtgtttcatgatcctggatcgtgtcacatgtgtatatgtaccttaagcacaaggcttcggtttttgtaaactctgttggacctcctatctgaacaaagtatgcactgcattggtgtttctgtgtgctttccaagtgagcattttttcctaggatatgtgtgaaccagagacgcggtgttttcaagggaaagatagcctgggccggaactgaggaaccaaggtaccatttgaaattaaggttctcaaagcgtatattgccgagtagagagagaagagggaattcctgcaagaacacaaaaccatggcgattttgaaggacagagttctaataggtgttccaggtcattcaggtacttcggggccatgcataagtaggaagtggattccatgcttcccctcagagaatccttggggcggggcgggggactggatactcccagtcctcccctccccctcacaaggcggaatccccacggggctttggcaaaccggtgcaacgaaagctgcagaatcgccctctttcccgctgggtccagagagatggcaaagagtcttaggccgggtttttttttttgcaaccgcaccccctccccaccccgccctctatcgctgtccctggggatctgcccccaaggctaggagggcaggacagagtagcgatgtggagaattcgatgtccgagcgacctcctcggaggagtggatcgagttaaatataactgcgcgaatggaatggcgctaaaaataaggtagcagctggcagatcctcttgccctgtcccgggaaaggagggggcaagaatggtttcgcccagggagtagctaggaggtacggcttccgcaacctgggtcgggggaccactgaggctccactagattgtccggaaatggaaaggggtagccgtctggggggcgagtctcaggtctggccttgggatgctctgggctttcaaaggggtcagaaggcttgaacatgcgcctggacgtaagggtcgaagggcggggcatccagatatcataccctgccgccagggggagctgagcactaggaaagacgcggagcttgggaggttgatgggtgggccctcaggatgagggtgcatcgttgtcaccacgcactccctcgaggcccacggtggtcgcgtcctctgagcgccccgccctacccgtctcagggccccatcatcagatccacaattgaaacgtttccaaaacgggctatttatttgttcccaataaatcgatcggtggtgattaagaaatcgatatggcctgggtgggcgagtctcgccgccagggaaaggcgcttttgcgcgcgcccgcaggactacggagggtaggtgcgggccacagaaaggcgtgcccggacgaccacacccgaagacagggtacctgggcactcttgctcagggctgtcgaatcccctcgggctgcaagccgagggcacgggtgagactcgccacagacccttccttttttttttttttttttttctcccgcgcgcggtagagctgaggccgccagcggccgccgcgcggccccgaggcttttgttgctcctcggctggctgaatagggattttgtaaagcgggacagataaaaatgagcagcatcatattgtttgacagaatgatcccgcgtgatgaagtgtcggctccgaagggggtgaaaatggtgaattcctaaaaacccagccctcggcttctccagcagctaccgttagcctggagggacccagcggacgccgggcccgcggtgtcgcatcgaactgcgtcggcaagactctagcttgcaatgccaagtcatttttaagccctgatcctgcccagaatctttctcctcgcgaatgaaaagaacaattttcgagagaaaggctcgttttgattaaatctgacatgctgctgataactccatgctaatgtgaaataattaacataatagccataattaaaagcacgctaacaatgccataaatttatcacacaattttactagctttctgcccctaactgctctctcatcgttaattaaacgtgttgccttttacagaatggatgtttatacatttccaatataaataaattcgaaaccatcctctctctcctctctctctctcttctttcctttggtctctcgccattcataggcacgcggattgtgtgtaccaggtactgaaaataaatgaagtctcgagatgttaaatttaaacaagaacattaaattagcctctaccccctccaaccctccccaaaagagttctggagagttatggggcccagtgtttgtgggtcatggtgtgttgaaaacactacccattaggcagatgaaataatctgcatgggttagggtcccagatatcacctctgcctttcccatctcccttggtggcaaacatccagacaaaaaggctgatgatggtctattaagtctacgaaaattgtccagaaggagcggactttggcttggaggcaggtaatggatcccagaaaggaaagctgtctttcaatttcaatttttccaccatggtttgttttctctgctaaaggaggtggctgccttgggtagagagacgctatcctagcttctcccaaggtgatctcatcttcccgggttgttagaaaagtgcatttgcccacaggaataatgactatatgcctgcttcaatgatttggtcaagcgataccatagtccctgacttggagggagagagagctcctggggtcgcctaggcctgactggaccattctgattcccgcactctctgaccctatcctcctcccgtgttgaccacctaagaatccaaattgagttgtaattaatttccccctctccatcataaattggcccatccacatcctcttccaagagcgcacacactaaatctctcctctggagacgtctcaattttccttccatcgatcctgaccctactcttcttgcttccttttactagaacctaggttccccctccactcctggaccactttcagtggcttccccagccctttactgccaactctgccagtcccaggagaaaccggtgtctctccacttcattctcattaggcggaatcggttccaacacttgagcaggtgaggccgctggctgccaccttacttttaaatatctcctgggaagtttgctggctgacccaagttgtcattcccattcttaactgtgttacagtgtgcgccccttctccctcagcgaccccaataatctttggcgactgaatgtttatccttgctcaccatttcggttccctgtgtcacgcctcccaccccaaagtatatcactctccccgattctttatttcggttgcaaagtttcgcggtgtctgaggacataggtttttagaggcaagctacaatctcaccgctaactatttagcgcggaatccagctggcttcaggcagattcccgcggcgatgagccctcccccccgccaacctttctgcctctcacctgtactacactaccgcttagctgctgcttcctccagcacagaggctgtgccgaaactgatgtccacccgaagagaagaaaaccacagagggtccccaaacagagcgatcacgggaatctctgcggtctcctctagaaatcgatattaagccgctaggcccgcgcgggcgacgggtttggggacagcagcctgagcgtctcatcatttagctaatcgagtcgaaaagtttctgtaggggccggacccagcatcagatggtaacactgattgaacaagagattagcacaatagatctctaaccgaggggaagcgttgcttttcacgctacgcaccgtaattaatggtatgaatcaattaatttgacttttattgtgtcgaaggaaaaaggcgcaacaaatggaaccggcagctgggagttgttcaccacccctttccccagagaggttccaaggagatacacgggaacggaccgcccagatccggccttggcgaagggggagaggcagccgtcaacgaggcggacaaagtctcctgagccagctcaggctagccgggaaatcgaaattaggctcatttggagactaaaaagcggcctcgagagcagccttgaagccagggttctcgcgcgcgtacaagccttcgccagaggctccgccatcaagatcgcggtccggtccactctgagccttgcgcccgccaatacaactggcaatccaagttgggcaaaaggttttcctaaatttgtaaatttggatcgtgttttcttttcctccccaccttcctttgagttgcttgagcagtcgccactgtgacctcttgcctagggtgcagccagctccagctggtagctcctgtcggtttcccgagaagactgtctagtcagcggaatagacgtttttgagtcagcgcgtcattagtggtgcagctgcggaaatcaactcaggcatgcgttttagggccaggtgtaaccccaagatcaactggaaacaaacaaacaaacaaaaaccatagagattccagacctctcaggatagtcactgctctccccacccccacccccgccccccaagcctgtagccgcccaactcggagcagcattgaaatccatacgcaaagagctactggtattgatgggagagttgtgtaatgggataatcgtcaacctgtggtgtcctaatgcctgtaaaaatgcaattttgcatattaagatattttattaatttgatgtaactaggaaaaatggctctaggtgacgatacagaatcagaggcacactggcaacctggaagtacctaactttttcgctgtttcctataaacaatacagaaattgtttcctccctgacttcctcctctcattctcttataacctggggttcatagatccttcccctaggccttcagcacacaaattaatcgggtttcaagaaggctcaaatcggtaagtgctctcctctgacaaagaagcggcctaaaagcgaggggggtggggttggtcagggcgaccaaggtcatctcaaaccactccgggctgggaacaccagttcccctcggacggacgtaccgagtccactcacctcagcaacagcaggcgctgaccctgggtcactttaaagtccccaccccagcatctctgggatttcccagtctctcctaccagagctgacattccttgtacttcacgtgcgctggacacatcctcgcctcttctttggcgcagatttctacagaagttaagtcttggatagtttattcacactttaagagataacccacattagttagcagcagaggtgagcccactcccgccagcacgccctgggacactgtggttccttggaggtcgtgccctccactcggaagtatacgccagctccccccagttttccaaccccccccagtcggtgcgccacgtctaataacaaggcccaaagcctcttccccaatcctctccacttacccaagaccgctgccaatgcctgctccgtttccagctcatttccgactttttctgtgctaagtcgtttaacaactccaacagccagttatgacgtctttgtttataggttccctgctattttacgtcctttttatttctctgcaactatcctaataggttaatcgatagctattctctgacctcgggaaaccccagctgatggtgttgtgaccgttgcgaatatatatatatatatatatatatatatatatatatatatatatatatatatattcctgcgtcgtgcccggaaagctagggtaagacttgagtagttagatttgggggtgatgcgaggcacatcagcagatgtcttttctctggaatagccctgaaacaggagggggtctgaggcctaattagcaaaaggaagccggatgtgttcctttaatccttgaatcgaaaacaaaaccccaaagcaaatcaaaatagtaagtttttttcttttcttttctttttttttttttttttaaatcacaaccttgttctgcattgccagttggtctatataatattagcaaagaggggagggcagggtagtaaaaaaaannnnnnnnnnnnnnnnnnnnnnnnnnnnnnnnnnnnnnnnnnnnnnnnnnnnnnnnnnnnnnnnnnnnnnnnnnnnnnnnnnnnnnnnnnnnnnnnnnnnnnnnnnnnnnnnnnnnnnnnnnnnnnnnnnnnnnnnnnnnnnnnnnnnnnnnnnnnnnnnnnnnnnnnnnnnnnnnnnnnnnnnnnnnnnnnnnnnnnnnnnnnnnnnnnnnnnnnnnnnnnnnnnnnnnnnnnnnnnnnnnnnnnnnnnnnnnnnnnnnnnnnnnnnnnnnnnnnnnnnnnnnnnnnnnnnnnnnnnnnnnnnnnnnnnnnnnnnnnnnnnnnnnnnnnnnnnnnnnnnnnnnnnnnnnnnnnnnnnnnnnnnnnnnnnnnnnnnnnnnnnnnnnnnnnnnnnnnnnnnnnnnnnnnnnnnnnnnnnnnnnnnnnnnnnnnnnnnnnnnnnnnnnnnnnnnnnnnnnnnnnnnnnnnnnnnnnnnnnnnnnnnnnnnnnnnnnnnnnnnnnnnnnnnnnnnnnnnnnnnnnnnnnnnnnnnnnnnnnnnnnctggtgaagtgagggggtgcggcgtggaagaaacctccggggtcgcgagcagtagctgtctcctcgtagagaagcgtcgaggcaccgcaagagttcgcggagcgcggctgcggagcgcagcgcccgcaccgcgcgatgccaggcctcctcgtgtgagctgacccgacagggccccgagctacctgtgccctctcccccccccccggctttctttcgggggacactcacacctcctttgcctgagctccgcggccgcccctcgcggcccccctcgctctctgctcgctcctggccgccgccaccaaccccgcggagggatgaccctctccggcagcggcagcgccagcgatatgtccggccagacggtgctgacggccgaggacgtggacatcgatgtggtgggcgagggcgacgacgggctggaggagaaggacagcgacgccgggtgcgacagccccgcggggcctccggacctgcgcctggacgaggcggacgaagggccaccggtgagcgctcatcacggccagtctcaaccgcaagccctggcactgcccaccgaggcgaccgggccggggaacgacacgggagctccggaggccgacggctgcaagggcggcgaggacgcggtgacaggcggcggtgggcccggcgcgggcagcggggcgacgggaggtctgaccccgaacaagcccaagaacagcctggtgaagccaccctactcttacatcgcgctcatcaccatggccatcctgcagagcccgcagaagaagctgaccctgagcggcatctgcgagttcatcagcaaccgttttccgtactaccgggagaagttccccgcctggcagaacagcatccgccacaacctgtcgctcaacgactgcttcgtcaagatcccccgcgagccgggcaacccgggcaagggcaactactggaccctggacccccagtccgaggacatgttcgacaacggcagcttcctgcggcgccggaagcgcttcaagcgccaccagcaggagcacctgcgcgagcagacggcgctgatgatgcagagcttcggagcctacagcctggcggcggcggcgggcgcaagaccctacggccgcccctacggcctgcacnnnnnnnnnnnnnnnnnnnnnnnnnnnnnnnnnnnnnnnnnnnnnnnnnnnnnnnnnnnnnnnnnnnnnnnnnnnnnnnnnnnnnnnnnnnnnnnnnnnnnnnnnnnnnnnnnnnnnnnnnnnnnnnnnnnnnnnnnnnnnnnnnnnnnnnnnnnnnnnnnnnnnnnnnnnnnnnnnnnnnnnnnnnnnnnnnnnnnnnnnnnnnnnnnnnnnnnnnnnnnnnnnnnnnnnnnnnnnnnnnnnnnnnnnnnnnnnnnnnnnnnnnnnnnnnnnnnnnnnnnnnnnnnnnnnnnnnnnnnnnnnnnnnnnnnnnnnnnnnnnnnnnnnnnnnnnnnnnnnnnnnnnnnnnnnnnnnnnnnnnnnnnnnnnnnnnnnnnnnnnnnnnnnnnnnnnnnnnnnnnnnnnnnnnnnnnnnnnnnnnnnnnnnnnnnnnnnnnnnnnnnnnnnnnnnnnnnnnnnnnnnnnnnnnnnnnnnnnnnnnnnnnnnnnnnnnnnnnnnnnnnnnnnnnnnnnnnnnnnnnnnnnnnnnnnnnnnnnnnnnnnnnnnnnnnnnnnnnnnnnnnnnnnnnnnnnnnnnnnnnnnnnnnnnnnnnnnnnnnnnnnnnnnnnnnnnnnnnnnnnnnnnnnnnnnnnnnnnnnnnnnnnnnnnnnnnnnnnnnnnnnnnnnnnnnnnnnnnnnnnnnnnnnnnnnnnnnnnnnnnnnnnnnnnnnnnnnnnnnnnnnnnnnnnnnnnnnnnnnnnnnnnnnnnnnnnnnnnnnnnnnnnnnnnnnnnnnnnnnnnnnnnnnnnnnnnnnnnnnnnnnnnnnnnnnnnnnnnnnnnnnnnnnnnnnnnnnnnnnnnnnnnnnnnnnnnnnnnnnnnnnnnnnnnnnnnnnnnnnnnnnnnnnnnnnnnnnnnnnnnnnnnnnnnnnnnnnnnnnnnnnnnnnnnnnnnnnnnnnnnnnnnnnnnnnnnnnnnnnnnnnnnnnnnnnnnnnnnnnnnnnnnnnnnnnnnnnnnnnnnnngtttttatttttttaagaaaataaaaagcaattcagtagatttagagctttgaactttcatatttttttgaaggttcactctgcgcagttttatctgagaaaaagaatgtataaagacgttgggagattttaaatccaaaaaaaatttttcaaaaaggcgaagtgtcattgtattataaaagtctgtttatatatgaatgaatatatatggtattctaaatgttattccatcgtgttgtacacaattttgtaaataaatttttaaaatgctcagcctagtgttttaattaggtgtctagcaaatggcaagattttacaatggaatttgcattgtcttccccagaaaatctagcagtcttaagtaatgaccttttcaaacgttgcaaattcacaatttgggtgtagaaacatttgaatttgaaaatggaaagagcgtacttaatttaaattatattaatatgtgacttttcacataaccaggataaggatgacaatcccattcatatcaagccactgtgaatgactcgcagctcctgcaaagtgtgctgtcattaaaaatctaggcaaaagcagccttgttcattttaaagaacattggtcgaatataaccccctaggcaaacttacaaggagtctttggtcatttgaattgtcctttcaagaacaaaattccaaacatctcgtattttagcatttaaacctcgggtttttggaattccttttcatcccttcattggaaatgctaaatctcattgatttttaaactcacatggtaccattttggcctttgtattgaaatagtatcttgcattacgatgataggcaatagatcgtagggttttgttttttgtttttcccagaaaaatatcaagtaaaatccctctttttccattgcaattatcaactcacataactagatatctagaggattcccgaaccggtaacccctcctctcgagcctttcagaaggccaaggaatcataatactcttctaaagccaggtgcatgttacctccgccctttttttctaccttagccagattcatgctttttttttgagagagagagagagagagagagatctaaggtaggagtaggaaatatccttgtagattattttaggtatgcatttcagctgtttcaatgttttaggttaagtagaaatgaaaggtctagacatgggaggtctgttgggccaccaccagcataccctcaaacggcatcaattctaattattttgtaattaattagctgttacaattacttatgcgaaatcagtttttaactccgaaatcataggtagcagcgatgtcaattccaccctgcgagcgtcttgtcggtaaaacccagcaatgtcagcagtcgtgtccactcctcgcttcccactcggaagccgagcctttttctcggcggccggcgtgggcttgggggtcgctctgaaagacacttcctcgcatataccgactctgttttcctggtaaatgataaatgctgtgtcctgagtaaacattccgccgaaagcggagtcttaaaataaaacaggctgctggggtgagagtttttaacttgataaacaacccgataatgagccctgctgaagaagctactgtaacgttcggcgaggagagctttacttcgggcgggtcccttctaatctccttttacaaggaaaactaaacggatctaaattggtttgtgcgttgcagctataaaagtcacaagttgtttcacagttgtgtctggctaatcggtttttacacaaacagcaaatggtacacgatttgtgcaaacacacagaggttacttctaaatttagctggcacccctgggaaaagagaaaggcagggcttcttgaattcacttttagcctcaagaagctgctgatccaaggcttctaaatgacattggataacaggggcctcattccatccctgatcctttgttacttataaaattactcgctcatatttccgcgcatagcagcaataccggccgagcctgagcacgcagcctgacactcggacacaagctgccgcttgagatctgcagtgccttttccagcgacgcattaggcagcgcggtgtagaaaccacggcaactttccttccagccactttcgctctatcaacaacagcctcttccccgtgtagttagaggatgggacatctcatgcccaaacaccagcggccagtgtttattgaaagtcctgatgtaataccgggaaagtagagcccagccatacccttggaaaagaattgagcttacgctgtttaaatggtgaagatttagagaagacgatgaaattttttttttaaatgtagataaatgtactcaagcacttagtaggttggagcaagctttaaacacaggtttgatgtttttagacacgcgataaaaggtgatgaaatccctctaaaactgggattttaaaacagtgcgattgccacctgctttttattacagctttaaaaaaagagaaattaaaagaaaaaaagggaataaataaaggacacaggttgggtataaaggaaagatgctagccttttagttacactccgatttaagcattcattcttcgcttcctcaggcaaggatttccagacattcaattcactctcgaagcctgggactcctagtgtgacctcggggtggagttcccaagtaggcctctcacccagtcccttgcgggaatgtagggaggattctgaaggttcaggggaaaaaaaaaaaaaaaaaaaaagtgaaatgctcatactagctgagcggaatgtagctgcgatggcggatgtggcctgtagggggcgacgaacagatggaaaactcccgagctgtttttgaagctccaatgccagacctaaacccctcgcccccaacccctccccagaccttttcctagccaggctctgaaccaaccccccctgacaccatccttcattctcaggtcctggaactactaggtcgaatctctgagaagctgctatccttggccggtgtcctgaaagggatagggtctggaggcgaatttgtcctagaaattatgaaacagtgaaatttagtgatgagaaaacactgtctcggaagcaactaagaattatatttgaagttatttattttacacgactttatgggaagaaccttagtagcgaagagagcacggaaagcggggggggggggggggaggcggagggggtgcgttttaaagcaagtgccgtgagaactgacccgaagagaatgaactgaaagaaagccagctacagagacatgagtctatgcaactccacctgtgtcccgggaggtgcaggctacagcaggatccaaatagttggggtgggatgggggtgggggaggcagcaaggtgagagaggcctctcagaaggcattccaaccaggtatatcctttaactttggccaagcagcctgtgttttgattttggtttttttaaatctcccaaattgtttgattctacctgcagaattaggtttgtgttagttgagggcggggggggggtgtataaactgtgaagtgccccacggtcacaccgatctctctccttttcccgcccccatggtctctagacagaggaacaacgctgctctaaacacccaggtgttcgccttggttttgagcgtcttgatttcatatgtgcaagagttttccaggatgggtcacagaacccagtcccagcaccctgtggcagctcagagtggcttgtccaagattccagtctcaaatcgtcctggacgcctgtgctctgggaggagagtacccaccctcagatccacaccgctgaggggctatagtctcctttcctactaaagaggttgcttccattaactaacctgggcaagttgggaaatggaagacctgcgctgacagaaacccattagctccaggcctagcttcggaggcgagttgaagataatcacatcgcaaaaacgcctaaaaagaccaccctccttcgtcgccctctaactgttggctgggtggcacctacagccacttattctccaccgccgcccccttctcatgtccttttatgaatggacgagccattctttgctctctggggtaaaactaaccaaaaaggactctgtaccaaatagtatttgaaaagaaacataggacagacgatcacaaccatcccggttttatttattcacatgatgttttacatcggaatttccctaaattactctaaggattacattttccctacattttgtggagaattaaattagtccacttccctgatttcatcataaaaccaaaagctgctttcctcagaggactttgtgtttttgcacacaggtccatcccgccaggggtgggaaccaaggcgatatcatttcctttcaaagctcacacctagaatacggctttacagcgagtgtcaaggagactcgtccccttcacacatacatagctacagaagactccttgacttgcccaaagtcaaccaccaggccaagctggtcgaagtctcgaacacgaaggaacgtgttccttgcccgaggactgcgccatctggggaaaagaaaacagccggccctggggcaaacgaaggtgggagctggagaaaaaaagctaagagaagcgccaggcatgggcagctgtggaaagggagcagcagacttgggccttgggaccttccttccaccccgggtgccttcccttagcatcccggggaccggtgcctcgggtaccgcactgaacagctctgtccggaccgacggcggcttgacctttccgtgagaatttagaggggagaacgcggagacttaggccagaagctctcttggccagctgggcaagcagcccagccacatcgctgcagggtcaggagtggatgtcatcggtgcccgccacctgctctctgcgcatcactccccctacatcagcctccagggttccagctcccccagcctagaagtgtaaatgggagaaagacctggaacgcattaggaaggctacccagcgcggaaaggcacccactgtgaaggtggtgtggagagggatacgcaattggcacaagccctctggctgagtcctgcgttgtccagctgcgtgcgctcaggaggcaaccgatgggaggcaatttcccccagagtcaaccttgcagcagaagccgcagctgggatctcaggtaagttaccatgctcggctatggctgagggtctcagaaagaagcaccctcactccaccatggcccgcgcctgtggggcctaaagggaccccgcattagaagagtctcgagaagcaacttttggttccttttctctcaagacacctcccactcctctcaacaaacggtagacaagnnnnnnnnnnnnnnnnnnnncaacaaacggtagacaagactcagtcttcatctaaaacacaccctttgtccttgttacatccttttctgcaaagggcgtatgtccgattcatggggaatttttcactaatacaacctgcaggcactaagttttctcattgctctcagacttcacccccggaacgcagcgccccctccaggaagccttcctcaaccttccaatttaggttagtcgctccttctctgaggtcacccatgcgcagtaatgactcagctattcattctctggttctctgatgaacccccttactacctaacactgctggacacaaggggagcattcagattagaagcatctgacctcaaacatgggcttggagactctgagctgatcaaaccaggtcttaagagttggaaggaggggctggggagatggctcagcgggtaagagtgcccactgctcttccaaaggtcctgagttcaaatcccagcaaccacatggtggctcacaaccatctgtaatgagatccgatgccttcttttgaagacagcaacagtgtacttagatataataataaataaaatatttttaaaaaagagttggaaggactgttttctttccatccttttctccgggccttttctttataataaataaatgcttttataaacaccctgttaattttttttgacgaagaattttaaaaagcatttattagagatctaaaacgtgtaagacacatgagctgttcattggattttctgagtatgttttctttgccaccataaaatcggccaaagatttcttgcctgaaatagcagcagacgcacccatgtaatgggagatccctcaactgcctgtttcattcactgggtgcttcagctttcaaactgaagagaaaaccaccacctcacacttagggcatcctaacttttttttttaattctttttttttaagatttatttattactatatctaagtacactgcagctgtcttcagatgcaccagaaaaggacgtcagatctcattacggatggatgtgagccaccatgtgggatttgaactcagggccttctggaagaacagttggtgctcttaaccactgagccatctctacagtctgggcatcctaacttcaaagtctttattttcctgggaaagggtaatcgctttaaaagagctctttgcttgagtttttataggaaagatggtgccagtctatgttgggattctttatctagaaacacaaagaatccattgtggtttagcagctacagtaaaactgggtaggtgtggggagggggtgtcccagtatggtctggggacttttctccaggatctgtgtggagaccaccttacctgggactggatgcagatcacaaaggcgacaagtctcacagaatggttgctagcattttgtgtctcactaccttcagataaaactatttttagagagttcaatagggctggaaagatggttcagcagttaagagcaccagctgctcttccaggggaccaagttctccattcccagcacacatatggtagctcactaccatctgtacctccagttccagggcatccaatgcattcttctggtttctgctggcaccaggcacacacatagtaaacatgcatgcaaacatacatacgaacagacagacaaaacatgcatacacataaattaaaaattttaaaagaaggttaaataaattgctctttcattgtgtgttcctggcataaaagttgtctttcaaagccaggtgtggtggtacatgcctataatcccagcacccaagaaggacaatgagatcaagagttcaagaccagccttatacctagtatgttcttatttatttgagaccctgtgttgcatcactccctaaagtcatctcttacttgcaactcattaaagccatttgacttatggaagtagggactcggatgtctttagaagatattaatttaaagcagagcaagaggaaaatctcatgttatctggtcattgctttctaactgggatcaagctaatgtgagtgagggtgaatcatttgatagaggtttttgcaaatttatatctctgtttgtttggtccctattcctctcagcctttcatggctctgctagcttccttctctgctttgttgcagagtccagcacctcccacacatgagtactggctactggaatcccagccagggtgaaacatatgccttattgatggcacaccatgagaaattggggccttatgatcaagtttctcctgctatcaagaaacaatgcaagaagtgatagactggatgaaaaggcatgattaatttctaggcctagtcttgacattgaacttcaaaatatttgatggactttatatttgctgtggtagaggcctctatatatttttaagtttgatttgcgtgtgtgttgtacatatgtgtgtatgagtgccgtgcatgtgtacactcgtgtgtgtacatgtgtgccatgtgtttgtgtgggagtgcatgcatatgtggagagtctgtgtgtgtgtgatgtatgtgtgtgtattaatgtagtgagtgagtgtgcacgtgtgtgtgtgtgtgtgtgtgtgggtgtaagagagggaggaatgaagtgacatgccatgtgcacatgaggaactgaaaggacaactgtgtgaagttggttctctctttctatctctgctgtgtttctgggcaagcatttttaccacataggctgtcttgccagccctgaagactaccattgaagatttagctgaaaggtagaaattatagtataataactatcatttcaattttttttaaactttttgagtaactgtttaaaaatttaaagatttttttaactttgatttcacttttgtcttgatttaagatatctgtcatcctaagccatctgtcattcaaatctcgggctctgtgaagacgttgctaatatgtacattaggaaactgggtatcccttctaccacccagaaggccctgtgcaaagagacagagaacaaagagacggaaagcaaagagatggagagcaaagcgaccttccactttgggaagcgccactcaggtgtagcttattcaattcacaaatttaataggttgctgattttctatgttgccttaaaatattcttacattctttaagagaccattttattaaatgtattaattataagggttaaaaacatcatctgagagataattactgtgttttaaattgttttctttgccagtaggtgtttattagttgaaatacagaaaatgtctaggaaaagtgtgggctttggatttaatggtcttattgtcaaatcttgatattctctctctctctctccctctccctctctctctccctctccctcccccacttttcccccctctctctttcttgacaggggactcttgctctatagcctaatgtgactttgaacttgtgataacttcttagcctcagtcttaagtactgggattgtgggtttcccccacaatggcccggcttgctggtttcttcatatgtggctcttaatcacagttagctcgcctctccgtttctgttttcttgtttgtaaaacaagaatcggaacataaagatttactttgatgagtctggcaggcttaacgatggtgacagctcactgctctgcagttttgctgatcttatcgtggtcacatttctaggaggccaccttgatttttttcccctctgataacatataccaaatagttgtcacatttcatatttaaaaatgaagttgctgggaccactgtcttccccatctgtttgagttaggtatcatttttgtgttctcacaacttaacaaatgggaagcaatttactctgtggtgctgcttggtaaatcactttctcactttcaagatatttttcagtcttgtggatgagaggtcttgacaatagtcattaaagatatgatagcattttccacaagcacaaggacatgcgcccatgtctctttgctgagctctggtctgggtagactaattttgacattcttttcttctatgtctaccctgaagtttcactagaggaagttactccctcccagtactggatcagcttaggccaaagtccaaacgctagtgtatgaaaaccatcttggtcatctactcgtctaaagacacagtagaatgagctaggtgtgagctggcactgggtgtagtaacacacctgtagtgacagaggtggcaggaggcaagagaatcaccgtgggtttgaggtctgcctaggctcagagcaacacgctgctcaaaaatacacaaccccctgcagctcagtgggcagaacacttgcctagcatgggcagaagagcctggatttcatcgtgagcactgcataaaccaatgtggtaatgtactagggaagtagtggccagaggaggaggtcaaggtcaggctactgaggtgattgtaaagcacttgccagggaatcctgaagacctgacatctatattcccagaacccaaagctgaataaaagaacagactttcaaaacttatggcacatggacaacacacatacacacacacacacacacacacacaccacacacacaggtgatggtgatggtgatgatgataatgatgatgtgatgataataagtttaaaaacatatttgttaagggtgatgagatggctaagtgaataatggaggagtctgctcagaaggtctggtgatctgaggttgaccctctaaacctctggagagacccaacgccatacaattgtcctctgagctccacatttgaaacttggcattcatgatcacacatacttgtcttgcacaaacagggacagacaaacaatttgttgttgtcgttttgtgtttgcttgtttgttttgaaacaaggtttttctgagtggtcctggctgtcctagaactc

SEQ ID NO: 857 - DNA, 1323 bp, Mus musculus
ctggtgaagtgagggggtgcggcgtggaagaaacctccggggtcgcgagcagtagctgtctcctcgtagagaagcgtcgaggcaccgcaagagttcgcggagcgcggctgcggagcgcagcgcccgcaccgcgcgatgccaggcctcctcgtgtgagctgacccgacagggccccgagctacctgtgccctctcccccccccccggctttctttcgggggacactcacacctcctttgcctgagctccgcggccgcccctcgcggcccccctcgctctctgctcgctcctggccgccgccaccaaccccgcggagggatgaccctctccggcagcggcagcgccagcgatatgtccggccagacggtgctgacggccgaggacgtggacatcgatgtggtgggcgagggcgacgacgggctggaggagaaggacagcgacgccgggtgcgacagccccgcggggcctccggacctgcgcctggacgaggcggacgaagggccaccggtgagcgctcatcacggccagtctcaaccgcaagccctggcactgcccaccgaggcgaccgggccggggaacgacacgggagctccggaggccgacggctgcaagggcggcgaggacgcggtgacaggcggcggtgggcccggcgcgggcagcggggcgacgggaggtctgaccccgaacaagcccaagaacagcctggtgaagccaccctactcttacatcgcgctcatcaccatggccatcctgcagagcccgcagaagaagctgaccctgagcggcatctgcgagttcatcagcaaccgttttccgtactaccgggagaagttccccgcctggcagaacagcatccgccacaacctgtcgctcaacgactgcttcgtcaagatcccccgcgagccgggcaacccgggcaagggcaactactggaccctggacccccagtccgaggacatgttcgacaacggcagcttcctgcggcgccggaagcgcttcaagcgccaccagcaggagcacctgcgcgagcagacggcgctgatgatgcagagcttcggagcctacagcctggcggcggcggcgggcgcaagaccctacggccgtttttatttttttaagaaaataaaaagcaattcagtagatttagagctttgaactttcatatttttttgaaggttcactctgcgcagttttatctgagaaaaagaatgtataaagacgttgggagattttaaatccaaaaaaaatttttcaaaaaggcgaagtgtcattgtattataaaagtctgtttatatatgaatgaatatatatggtattctaaatg

SEQ ID NO: 858 - protein, 351 aa, Mus musculus
LSPRREASRHRKSSRSAAAERSARTARCQASSCELTRQGPELPVPSPPPPAFFRGTLTPPLPELRGRPSRPPSLSARSWPPPPTPRRDDPLRQRQRQRYVRPDGADGRGRGHRCGGRGRRRAGGEGQRRRVRQPRGASGPAPGRGGRRATGERSSRPVSTDGTAHRGDRAGERHGSSGGRRLQGRRGRGDRRRWARRGQRGDGRSDPEQAQEQPGEATLLLHRAHHHGHPAEPAEEADPERHLRVHQQPFSVLPGEVPRLAEQHPPQPVAQRLLRQDPPRAGQPGQGQLLDPGPPVRGHVRQRQLPAAPEALQAPPAGAPARADGADDAELRSLQPGGGGGRKTLRPFLFF

SEQ ID NO: 859 - DNA, 21437 bp, Homo sapiens
cttaactatgtgccaactctattctaagtgatttggatgtccttaatccttacaaaaaccccataaggaagatgccattatctccattttacaagtaaggatatgaggcacagagagtttaaggaacttacccaaggtcatataactggtaaaggacggaggccacagtgtgtcctggaaatgcattatagtcccataggtcaggggcatggagtgcaaaggaaactagaaggtatattggagccagattatggcacacctgaagtatcttactaaagggtttgggttttcttctacaagcaatgaggtagcattaaacagttttgcttttgttttgttttgtatgagacaaggtctctatctctcaggctaaagtgcagtggcaggatcatagatcactacagcctcaacctcctgggctcaatcaagcctcttgcctcagcctcccaagtagctgggaccatgagcatgcaccaccatgcccagctaactttttacttttttgtagagacagggtcttgttatgttttccagattggtctcaaactgctggctcaagcgatcctcctgcctcagcctcccaaagtgctggaattacaggcatgagccatcatgctcaatgtgcattaaatgtttttgatcagaggagtgactggcgtgctccaactgacatttaaggaaataatttgagtagtcatgtctatgactgaggaacaagggactagagagtgtttctccatctgtagtctcctcaattgatgataacaccatttcttctagacatgcaaatttcatatctgggagttactgtgaaatctttctcccttagcaatcagacacttagttccatccattttacttcttcagtcctctcaaagtcatcatcatctcctcttctccagtctcactgccaataatttaaatcataccttcttcatctcttactaagataacgaaatagcctccttgctatctccagtcttttactccctcagtttatccttcacattcccgcaaagaatagttccaaaattttatttcaatcatgccaatcagttaaagactttactggcttcttaataactttgggctcttcagcccagtattcaagagtctttattattttactctggccattcccttatctcatttcagttaaaccaaactatatgctgctcctcgtgtcttgcataaatctgtgtctttactcgtgctgtgttctctttcttttcccagaactctgttcctctttttctttacctaactgctgcttatcattcacaacagctcaaatattatttccttttttttttttgagacggagtctcgctctgtagcccaggctggagtgcattggggcaatctctgctcactgcaagctccgccccccgggttcacgccattctcctgcctcagcctcccgaatagctgggactacaggcgccggccaccacgcccggctaattttttgtattttcagtagagacggggtttcactgtggtctcgatctcctgacctcgtgacccgcccgcctcggcctcctaaagtgctgggattacaagcgtgagccaccgcgccggacagttcaagtattatttcttagggaaaccttcctacccacctattctctttcccaggcagagttagttatgtttcttttgcgctcctgtaacattctatcatatatttataactcatcacactacattttagctatggacttccctgaataagtcccccattagagtgagaatgtgtcttactgatcgggttattcaagcaatatttattgagccacacctccacccctacaccactagtacttggctggaggctagggatacaacagtgaacagataaaaattcctgcccttctggaattaacattctaaaggtggaatctatcttcttactcacctttgtggttccagtgtctggcccttgatgaatacgataaggttagaaaaacagctgggtctaacaactagccttttgaatattttcttttcaaaggatcttttcctttatctacgttcccttttaaatttcttccatgtgtttgttagtcaaatacttccatgtagtctaaatgtactatacctagacaaaatgtctaagcaaatttcaatttttacatttcccttctctcttcttccatccctttctgtttccttatcatacatctattgtccatttcccttgagaccaagtactttctggctgtccagaagtaccattaggcatccaacttagcactttcttttcccaaagtatcccgggttctaacttacttctccccaatctcccctgaaaacccctaaagtcagaggtagctggtcagtagcatcttccgtattgaaggcttcacactttctctatccctacccagtgagaaaggccctcctctgcgctgtttccccttgccatggcacctatcaacctgcatgacaaacactgattctcttgcctggttcttccttaaggaaccttgggtttaattcttcttttcattcctggtactttccaggtctacaacagttcaataaattactaataaggaataaatgagtaaataaatatatattgtatacttatatatcctctccccctgaattcagctgtgggtatgacttaaatccaagaaattttggattaaaatgagagttaccaaaaaaggcagctttgacccaaggaaaacttgtttctttaaaaatgttagaagaatttaaatttttaaaatgtgttttggcctggcaggatggttcacacctttaatcccagcactttgagaggctgaggtgggaggatcgtttgaggccaagagcttgagactagcctgggcaacagagcgagatcccatctctacaaaaaataaaaataaaaaattacctgggtgtggtggtgtgcatctgtactcccagctactcgagaggctaaggcaggaggatcacttgagcccaggaggtcgagggctgcagccatctacaattgcaccactgtactccagcctgagacacagagtgagaccctgtctcaaagaaaaacaaaaaaatgtgtttcgatatccgcgatccatgtcacatctgttagtgtacctttagtacatgacttctgcattgtttgctaactgacattctgtgtgaataaagcgtgtatcacaatggtgtttccgtatgttatccaagtgggtcctttccccaggatgtgagtgagcctttggcatggtctttttaagattttgccaagggaagactgggctggaactaaggagctaacataccattgaaatcaaatatcccgttgggtgcactggagggtagagaagaggggattcctgcactcacgctaaatgataaacttttccaagggcagggtcgtgagaggtcttccaggtcacctagtgttctgagtcatgcagaagtaggaaatggacacaatactccccgcagagaatccttcccacaggactgatcctgtcccttcctcccctcccccgccccacacaaggcggaatccccacgcagtgcactgcaggcgcggtggccactgcccctagaaccagatctctcccccagtcccgtcctctccaagctccagatatgtcaaggattcttaagcaggggttttccaatctgtcccttgaggaactacccctgaggcaaggcgggcaggcccaagctgcgatgtggagaattcgatgtccgagcgacctcctcggaggagtgggtcgagttaaatataaccgcgcgaatggaatggcgctaaaaataaggcagcagctggcctgtccacagccctgtcccgggaggggcgggggccccagtggtcttgggcaggaaggccgcgtccggcccaggggcgagaaggctgcggcgtccgcagccagggctggaaggcctgggaggccgcgctctgtgggccccggggcctccattcgggctgggtcgcgggcctggacggggactgtccagaggcatccgaaagccaggccaacttgcctggacgtaacaagacggaagggctgggcgctgaggtcctgccagcccggccgccagagggagctgagcgccagaggaggacaagccgaacccttcaggaggccgggcgtctccggagaccgaagcgccggaggacccgaggaggtctgccccgcgcgctgctctggagactcccggggcgggtggcgctcggcctttccgctcccttccttcccacaagtcccttcccgcgcgcgccccacggccctgcccgccctcccgcgtcagcgccccaaccgtcaagccagcaattgaaacgtttccaaaacggtctatttatttgctcccaataaatcgatcggcggtgattaaagaatcgatgtggcctgggtgggcgagtcgcttgaggggagggattgggggctttcgcccggcgcctgcagggaggccgagggcgggcgcgggcctgagggaggcgtgtcccgcccgggccacacccgaggacccgacacctgggctggcaggccccggcaggcagcgttccctccggcggagaggggcgcgcgcccgccgcctgctttcctcggcccctctcgcctttctcgcgcgccggggaggctgtggccgccagtggctgcggagctgctcagaggcttttgttgctcctcggccggctgaatggggattttgtaaagcgggacagataaaaatgagcagcatcatattgtttgacagaatgatctcgcatgatgaagtgtcggctccgaagggggtgaaaatggtgaattcctaaaaacccagccctgggctcctcctcgagctgccggtagcctggagggacccagcggacagccgggcctggccgcatcgctccaaacggtgtcagaaagactccggctttcaatgccaagtcatttttaagccccgatcctgtccaggacctttctcctcgtggatgaaaagaacaattttcgagagaaaggctcgtttttattaaatccgacatgctgctgataactccatgctaatgtgaaataattaacataatagccataattaaaagcacgctaacaatgccataaatttatcacacaattttactagctttctgcccctaactgctctctcatcgttaattaaacgtgttgccttttacagaatggatgtttatatatttccaatataaataaattcgaaaccatcctctctctcttcctctttctctcctcctttccttttggtctctcgccatttacaggcacgccttggcgtggaccctgagtggcagacatcttgaaaataaatgaagttttgagatgcaaatccaaacaagaacattaaaatagcctctttttttccaccccgaaaagatccggagaggtatacaagggggtagtggtgggtaagagagttgaaaatcccccgctttgggaaatggaagtaatctgggtgggttggggccttgggtaccacctctgccctttcccaccttccttggtggcggccatccagacaaagaggccggtaatagtttaacaaatctatgaagattgtcaagaagcagcagactttgattgttgcgggcgcgggggtgttggggagaaaggaggggaatttttctaatagtcccacccacgttttgctccctcttggacaaagagtaactactcttggtgggggacgcgcccttcactccgcggaacctggtcccaactccccgtattgtaagaaaagtgcacccgcgcgcgggcatgatgattctatctcacatcgcgccaacgacttattcaagccactggcactgtctctgacttaaaagaggagaaaagaggcatatgggttcacttgggcctggtgaggggtaggtgggcaattcccgccttccgcactctaaccgtgcccctcctccagtgttgaccacctaagaacccaaaatgagctgtaattaatttccctttctccatcataaatttttctatccatttcttcccccccatccccccactggacgcacacactaaatctcccctcccctggagacgtctcaatttccttcctatcgatccggactccattcttcttgcctcctgttgctagaacctagatccccactccccgcacccctcattcccaccgcgtccaggtggctttcccagcggggtaccatgtactctgcccgctccagaggaaccgaaggggtttcattccattctcctttggttgaaacatttcaaacatttgagcaggtgaggcagctggctgccatcttcctttttaaatctctcctgggaagttcgcttgttgagactcaaagagtcactcaaactcataattgcgtgtgtgtgtctactcattctccctctatctctccaataaccctttgagactcagaaactttttatccacatacaccctttatcacattttcttccccccactacatgtgtctcactttctctctgtatctgtctcgcttcttccgtctctgtcctacagcttggcggtaactgacgacctgtgagcttttagctgcaaactgcaactacgcggcaaacaatttatttagcccgacatctagccggtctccggcaggaccctgcaccgcgtcgggatcggacccttccgctggggcggcctcctgcgtcaaggccagcaggaaccttcctgtcgccctccccggccgccgcttcgcctccttcccgcccccggaggttgtgcaggcgctatggtccgcctggagggagaaagccggcggccggttcctgagccgagagcggccgcggaaaaatcctctgcctccgctggaaatcgatattaggccggcgcgggcgcgggacgtcggggccgcagccagtaggttgtgcacgtctcatcatttagctaatcgagtcgaaaagtttctgtaagggccggacccagcatcagatggtaacactgattgaacaagagattagcacaatagatctctaaccgaggggaagcgttgcttttcacgctacgcgccgtaattaatggtatgaatcaattaatttgacttttattgtgtcgaaggaaaaaagcgcaacaaatggaaccggcagctgggagttgttcgtcctccacccccttccccagggaggttccaaggagacaccggggaatggacggatcaggctgggccgtggcagagggagggtaggaggcagcgaccagcagcgtggagggagtccagagagctagcctctgcggacggcggaatcgaaattaggctcatttggagactacttcgagaccggtgaggggagccctgtagccaccatcctccggcgcgcatccacacatactagtccacgcgggcccagccaccaaggccgcggcagggccagcgctgcgccccgggcccctgcctttagggctgggcaacccaagcagagcaaaggaggttcctgaatgtgtaaatttccgctttttagctttttttttttttttttttggaccttccgacacttcggttgctgaggcagttgcagacgcgacctctgcagtcctgggcgatggccagccagctcagctcgggtcggtttcgcggaaagctgtctagacggcattgtaaacggttcggagcctgcgggccacaaagctgtggagctacggaaatcaactctgagatgcgttttagggccgtgtgcaacctcgggatcatttagataaagaaaaactgtggaggttggcgggcgtctcaggatagtgtcaccaccccctaccctgctcccagcctcagatgagtagtgttatatcctgggaaactgtctaatggggatgaaagtcaatctgtgtgtctcaatgcctgtaatgaagcaagtttacagatttttaaatttttatttttattttattgaattatttttggtgtgtctaggccaaggaaagaggagatcgtgggtggggaaacagactgagggaatcagaagcaccactgtccatccggaattaaatccacatcccagcatcttctgcaaatatttcactaattatttcctctcggaactcctcccctcgtgctccttcctctggtgaggccggcgctcccctcccaggccgcagcggacagacagggattgggttccgtgtgcctgccacaccaggcaggctcttgcggctcccaactaggcggcctaaatgagggaggaaagaggaggcgcatcgctgattcaccgcgtcaagagcactgactttccttggaggtgtgaggtccacgcaccccagccacgcacttgggggtcggtttgcggtgcctccccctccagtcccagtgaaatccccacagtttttcctactatcactgacttgccttgcactccgcgtgcattggccacacatcctcgcctcctccacccgctccgccgccggttttcttggaagttaaatcttggaggatttgtccacaccttaagagaagaaaatccacgttagctggcagcaacggagatcccagcatgctggcatgcccaagtctgcccaggttcccccaaggccatgcccgccgcccgggaagtcactgcccgcacccctcacgtttcttcagccgcccctgggcgctgcgtctaacctgaagacaccaggcctcttcccggatccactcgacttacccaggccgctgccaatcccagctccttccccagcgcctcatttccgattttttcatatgctaagtcgtttaacaactccaagtagccagttatggcttctttatttataggttccctgctattttacgtcgtttttatttctctcggcaactattctagtagattaatcaatagccattttctgaccttcgggaaccccagctgatgctttttgtggccgcacgaaaaaatacatacaggaaaacacgcccgcatcaagccgggaaagagcaggtaggacctgagtggtttggttgggggagggggaaaaagacatctcagcaggtgtcttccccggaatgagcactgaggccagaggggaatctgaaatctaattagcaggagggagccgggtgcgctgctcttactctttaaagctaaaaacaatgaaacaaaaagcaaaacagagactaagttttgctttttaaaacacgatatgggaacctcgttctaggtcgcccagtccctgtctaaggagtgtgacaaagtgggggggagaagggcggaagggagagggggcggggaaggcagggcagcgacagtcgcacagtcccgcggacgctcccaggcccacgccctgactcgctcacacccacccacactcacacccacccgctccctgggccccagggcccggatccagcctgggtgggggggtctccgggcgggccgcagcgccctccgtgccccggggatgctggcgcacagtgcggagcggagttgcgcgtctctcgtccctttgttgacaattccctgaaccaacttgagtttggccggctcggccgcggccctgacgtcacgcacggtcacgtggccccgcctcccgctggatctttaagtagaaagtaatctatcaggccagtccttaaaacgggactttcgactaccggggcttcggcgtccctgacacccagccccctgcccccccgctactgtccctgcccgcgccctcccgagctgctcggcgcccggcgtcccgcgcccgcctggaccgctcctgcgccccacgccagggccagaggccgaggaaggcgggctaagtgagggggcgcggcgtggagaaccgccggggccgggagcggtagcgagcgcctagtaccgagcgccagggacggcaggagttcgcggagcgcggccgctgggggcggacggcagagcccgcgccacgcgatgcggggccgccgagtgtgagctgagcccagcgggccccaagccacctgcggccccctcccctctccctgccccccatctttcgggggcactcaaaccctcttcccctgagctccgtggcagcccccgaacaccctcatcgcccgctgccccctccccgccgccgctaccaaccccgaggagggatgaccctctccggcggcggcagcgccagcgacatgtccggccagacggtgctgacggccgaggacgtggacatcgatgtggtgggcgagggcgacgacgggctggaagagaaggacagcgacgcaggttgcgatagccccgcggggccgccggagctgcgcctggacgaggcggacgaggtgcccccggcggcaccccatcacggacagcctcagccgccccaccagcagcccctgacattgcccaaggaggcggccggagccggggccggaccggggggcgacgtgggcgcgccggaggcggacggctgcaagggcggtgttggcggcgaggagggcggcgcgagcggcggcgggcctggcgcgggcagcggttcggcgggaggcctggccccgagcaagcccaagaacagcctagtgaagccgccttactcgtacatcgcgctcatcaccatggccatcctgcagagcccgcagaagaagctgaccctgagcggcatctgcgagttcatcagcaaccgcttcccctactacagggagaagttccccgcctggcagaacagcatccgccacaacctctcactcaacgactgcttcgtcaagatcccccgcgagccgggcaacccgggcaagggcaactactggaccctggacccgcagtccgaggacatgttcgacaacggcagcttcctgcggcgccggaaacgcttcaagcgccaccagcaggagcacctgcgcgagcagacggcgctcatgatgcagagcttcggcgcttacagcctggcggcggcggccggcgccgcgggaccctacggccgcccctacggcctgcaccctgcggcggcggccggtgcctattcgcacccggcagcggcggcggccgcggctgctgcggcggcgctccagtacccgtacgcgctgccgccggtggcaccggtgctgcctcccgctgtgccgctgctgccctcgggcgagctgggccgcaaagcggccgccttcggctcacagctcggcccgggcctgcagctgcagctcaatagcctgggcgccgccgcggccgctgcgggcacagcgggcgccgcgggcaccaccgcgtcgctcatcaagtccgagccaagcgcgcggccgtcgttcagcatcgagaacatcataggtgggggccccgcggctcctgggggctcggcggtgggcgctggggtcgccggcggcactgggggttcagggggcggcagcacggcgcagtcgtttctgcggccacccgggaccgtgcagtcggcagcgctcatggccacccaccaaccgctgtcgctgagccggacgactgccaccatcgcgcccattcttagcgtgccactctccggacagtttctgcagcccgcagcctcggccgccgccgctgctgcggccgccgctcaagccaaatggccggcgcaatagggacgcgccaatggccgggacccagggtccggcggcggcctcgagcaacaaatgcacctccaggctgcgcgccctgtcccaagcccggtcccggtcccgctgcccaatcctggactctgcctctccccaatttcctttcccctgagcccccaacgcctaccttccgcggcctccatcccctcgcgcacacctaagctggtcgagcaaactcaccgcgcgcccgccggggatagctttccatacaggtaaaaccgaaaaccgaattttccaaaaatgcaccccgacggcgcctgctcttagtaccgtggggatgggagggaaattctttgtatatatttgtaaaaaaattattgactttccttttggggtttttatttttttaagaaaaaacaaattccgtagatttagagctctgaactttcattttttttgaaggttcactctccgaagttttatctgagaaaagaatgtatagagacgttgggagattttaaatataaaaaattttcaaaaaggcaaaaagtgtcattctattataaaagtctgtttatatatgaatgaatatatatggtattctaaatgttattccatcgtgttgtacacaactttgtaaataaatttttaaaatgcccagcctagtgttttatttagttgtctgaagtaaatggcaagatttttaaatggtatttatttgccttttctcctccccagaaaatcaaggaatttcaagtaatggccttttcaaactttttaaattcataatttgagtgtaagaaaattttaattggagaaaggaaatagtatgcctaatttaaattgtgttactatttttcttttagttttcacataaaatcaggatgtgagtgatatcattcatatcaacccattaaatctaaatgaccagacatttctgtagataaagtaagctgtcatttaaaaaaagaaaccgaaacaacagcagtctttaaatttttttaaaaaatgactagacttgtatcttccacaatgaaaacttcccaaatgagagagttcttggtcatttcaattatcctttgaaaagtaagtaaattccaaacatccctctttttaacatttaaatcttagatttttgaaattatttcttttcattccttaagtggaagtggtaaatagacccagctggttttaaaatttatgttaaggcactttacattttgcagtgggattttatttatgttcatctgatagataatacatagttttgttttcataatattttcaaataagatatctcatttatatggcaataatcaatccacaacataattggatttctgaaggggtcctatagatgcttcctctccctccaacccaaagcctttctgaaggccaaggaatggtggccttaatacccttttaaaaacagctgaacatcacctctctccccttttttttctttaccttaggctaggttagtgtgaaatgcgacatcatagggcaggaatggggaaggtccttgtagattatttttaatttgcatttcagctgttaaaaacttttaaaagaaagtatgaaggtagaaatgaaacatcttgatgtggaaggctggttctcaccaccatcagcatatcctcaaaaggcatcaattctaattattttgtaattaatttagctgttacaattacttgtgcgaaatcgcttttaaaaactggagcgagtagcagtgctgtcggctcggccctgcgcgcgtccttttggttaatcccggccagtccccggtgttgtcgtccactttgcctccctggtggtggagatgcctccccgtctcggatcccacctcatttctccgctgtcgacgtgggctgggggtcgctttgaaagacacttccttgcaaatacccaatctgttttcctggtaaacggtaaacattattgtgtcttgagtaaacattccttcgggatcagggtcctaaaataaaacaagctgccgggggtgagatagtttaacttgataaacaagaacctgataaccaccgccgagagaggagcaatggtaaccttcaccgagaggagattatggaccacacggtctccgggcgggtcccttctaatctccttttacaaggaaaactaaacggatctaattttgtttgtgtgttgcagctataaaagtaacaagttgtttcacagttgtgtctggctaatcggtttttacacaaacagcaaatggtacatgatttgtgcaaacacatagagaggttatttctaaatttagctgacagcccctgggaaaagggaaaggcagggcttcttgaattcacttttagcctcaagaagctgctgatccaaggcttctaaatgacattggataacaggggcctcattccatccctgatcctttgttacttataaaattactcgctcatatttccgcgcatagcagcaataccggccgagcctgcgccagcagcgtgacactcagccacaagccaccgccggagactcgcagggctttttccagcgctacattcattaggcggcggggtgaacgggagagacctgccggcaactttccttccagccagttcttacccttgaacgacggcctaaagatggtccccttcctttatgtcgtggaaggcaggaaactctcggacccagaccctcaagctgccagcggttgtttaaagtcctggcagatgtcaggaagatgggcccggccgtcgcaccctcaaaagctctttttcgtttaagctttttaaacctcgaagatttagcacaaaatgggaaatgcaaatatcatagacaatgatcgcaagcacttagtggtggggctgggggaagcctgaaacccttgtttgatgttatggaacgcaggcacctgcgacaaacggcactggaaacagctctctcgttgagatttaaagtcaacactactgatatccactttttattccacttaagaaaaaaaaactaaaggaaggggggcagatttatttgcaataaaagaagaaagcgggttgatttttatggggaagattttagctttcggctacacacgcatttagacgtttctactttctctagcactcattcctagaaaaatcaatccagccctgaggcctgtggcccctagagcgttctcaggaccaaggtctgagttgggaccgcccgtatctagttcctcggaggggtggatctggatgtccggggaaaggcgaatgaagagtagagcaaaacatgtgccggctgttgagggctgtcgatgcgatggcagatgtggcctgtagggggcgacgagcagacggaaaacttcgcggtttgtctggaatggtccagccccagccccggacgcctctccttccctcccaggctctgagcctcctgacatccttgcttattctcaggccccggaagcctaggtcgaatctcgagaagctgatttcctcctttcccccgcctgtgtcctgggaggaacagagtcccgaggggagtttgtcctaaagattgggaggcaataaagtttagtgatgaggaaacattgacttggaagcaattaagagttatatttgaggttatttatttcacatggtttatagggtgagtcttggtagtgagaacatgaaaggctgacatgagtgtgtgagaggtgggtatttttaacgtgagtcccttgagaaactgtcctgaggggtatgtgatctgaaagaaagtgggttccagagccttgtgtccccggactccacctgtgtccccggtggtacaagctgcagaataaagtagtgaagggaggaggttggaagggcattctgaaagtgccaggctgaaccttgtggggagccgtctgtttcaagggaggaggcgacaggaagaagcgggatgagaaaggccttgcagaaggcgttccaacagggattaggcatttcctaactgtgactttggacaagctgcttggtttctttcaatgactgcatttcctcgaccctacagtgagaatgagtctgcctgtcacctgggcttacagaattaggtgagttggtgtcagtgaaaaatgtcttataaactgtaaagtgctgggggcgtgtacagtgtgttttttaatggcttctgcacgaagaaacaactctgttctaagcactggtacacggccaaatacattggctcggttctgaaccatttgattttaggtatgaaaggtggatttttctaagaggggttgcagaacccatcccaggaaactcccaccccagaagaggcttttaaaaggtggagcttcctcctggtctgtaggcctttcactatgcctgcggagaagctctcggtgcccacccatccttcagcctgcacccccagctccaggggcagggcatacgtctctcttctctctggcagagcggcctactctgctgtttgcccctatgcttccactatccgaggcaagtggggaaatctgagtccaccgctgacagactcccattagtgcaagatgcggcctgggaggcgaattaaaggtaaccagatcccaaactcacttaaaagaccaccctccccttgctgccctccaacagttggcagagttacacccagagccaacttctctcttcgccactccccctccttgccctctgaggaatgtacaagccattctttgctccctggggtacacaaaacaaaatttgaaaagaaatgtaaaactagccagggtgtctgtaagaaagcataaccatctcatttttatttcccgaagtgccgtcatatattagaattttcctaaatgcagaattaaattggtcccctcccccattttaacataaaactgctacctaaggctcttctccagatcatttgtgcttttgcacacagctccatcccatcaggggtgaggcggggaagaagagggacaccttcactctcttgcctgagtcctctggtgctgaattccgaacccgtcttcagaaaaacagtcctagaatatcggcattagaagtggcctccggggtcaccctggaggccctcttttcacacaggcccacccagaaggttctgggacttacccagggtcactcagcagcccaagtgcaagctatggaagtactcggaggaggaaaaagtgtgctttacccagcaagaaggcgccacttgaggaaacaaaaacagcagactctggggcaaggaagattggggagggttgagaggagaagggaaagacagacacagacgcgccgggccggtggaactcagctccgggaaggctgtggacctggaccctggggctccccgctgcctgggcgcctctagcccggcgatgagtggttctgcggggaccgacggccccatttccttcttgcctcgtgatgtgggagggaagaaagaaggcggcaactgcaggcccgaagctcccctcgcccagcggcccaaccacagtgctgtcgtgtcggggatcggtccccaagggagcccccaaccccctgcccacgccgagatcacccccgtgccaacctcgagggctcggcctgcgggactccagctgcccctgcctggagggagggaagggagaagagaatacgaattaattacgaaggaaacccaggtgtgaaaggcacccgccgcggagctgggcgtgcagcggggcgcgcggtgggacctctgctcccgtccccgtcccgcggctactcagttgcccgctcatgggaggctcgcgacggaaaataaatcccctcagagtgaacctgggaggccgagaggacccagcctgggatctctgggggaaataggggcaagtttaccacggtttaattaagccacagccctagcacgaggaccccggcgacccatccgggctgggggatggactggagtgccccccaccccaggccgcgaaccggcagcgagaagcacactctccgccatccccggccccgccgcttccgcctctgcggactccgcgtttgccatgctccttcccggggtccagggaccggagctgcggtgcacgtcttattgaaggggagagctttggttcttttcctccctgcatccctcccactttcctctcaacagatagtaagcaagactcaattttctccaaaaaagcccgttacccctttctgcaaggggcgcatgcctaggttcacagggagctctcttgtcagccccagaacaaccctaaactccaaatgttctgtttgctctcgaggtacccctgggatgcagcgtctcctccgcgaagccttcctgagcctccctgcccagaccagttgctccttcttgaagctcaccgtgccaattaatgagccattgtcattagtgttgccctctgagttcctggtgagttcctgaccgtctagcattgctgagcacaaaggggacgatctaaattatttgtctgatgaataacagcttcgcaccacgggagcggggataggggatcttgaaggctgttaacttatcaaatcaagtctttctcaagagtttggggaactgttttcttcccatttctttccttctttataatgaatgctttttataaacacttaatttttttaagtgaatgaattttaagtctttattagaggtctaaaaagcgtaagacccgtcaactatgtatttttctggcatgttttctcagtcattgtgaaattagttgaaaacttctcccagcctgaaataccagtagctggttccacctcccaccctaatgtagaaacctcttcagaacacctcggttttcagccagcatctgtttcaatttttccagtggaagaggaagaggaaccactacctcacaaaacaatccattccacttaggggcatcgttatttgttcaagggtctttcttttctagaactcctttatttccttagtaaaggatagtggatttgagagtcatttgctcagattttcatatgaaagatggtcgtatttccatgtgttgggtttctttatctagaaacacaaataattcactgtgctttagctcccacattaaaactactatttgttggggggaaactgagcaaaagctaaagttttgagaaagcctctggattctgtattcattacacacaatccaggatggtccacaggcctccttttgagacccacttggagagccttgggttcagactacactggtggtaaaactcttgtggaatggttgtaagagttttgtgttcctggtttttttaaccagataaaaagcttttttttttttttattctttttaccattttgtttttataagctaagataaaaagtattttttaaaaagttaaatcatttaattcatctttcattgctgtattccttggcataaaagttatgtcttacctatattagtcatctaaaccactcatcatataaaactaggaacttagatgtcttctctggaaaatattcatgtagattccactgtttaattagagaagcagaaagaaggaaaatcccagatatttggccattgccttccaattggaatcaagataatgtgttcttttgcattacccatctaatgcattttctggcaaatttatatcgcagtttgtgtggttcccatttgatttagtctttatatagctctgttagcttccttctttgccattgttacagattatactggtaaaccttctttcaaattctaccagcttgcaaatgtaaatgttggttacaagagcaaggtagtttcaagatcagcacaaattaatcacaaccactgtgaaacatctgctttattgatggtacttcaacagcatcactttccacatatatcaggaattatgactttatgataaagttgctcttgttcctagagggaatcaagtgcaagagttaatagactggattaaaagacaagactaattgctagtcctagtcctgacattgaatttagaagcccacatacagtaaagattactagtgaaaatttagctgagagaaggaaaggaattatagtataataactatcatttcaaagttttagctttttgagtaactgttttaaaaatttagtttttttaccttgattttacttttatcttgatttaagatatctgtcattcaaacctccagcagtttgagaacttatttactctaatactgatactatatactacaggtcagggtaagggattgaattattctctgctaccaccacctatgaggtccagtgaataatttgaaaaaggcttacaggagattgtgagcaggaatccgggctcaactttgggaactggtattctagtgcagtatattcaaaatacatacttaatgggtcacttttttttgttactttaaaataaaatattcttacactaaataagatgaagtttgagaagcatattattagttgtgagagctaaacacttatgatgtgagagatatctatattgtatttttcaaactgattcccttacttcttatttgagacacaaaatgatattctagaaggagcataggctttggaattgataatcttagggtcaaatcctggttctgccatttcttaactatgtgatcttgattaaagttactcagcctctctgaatctatgtttccttacctacaaaatggggatcagaatatgaagatttactatcacgtatttggagtgctcaaatgtgggggctattagtactacacagttttgctgttacatagtggtcatattttcatgaggctaccttaatttttactctgatatcatataccaaatagttgccacatttcatatttaaaaatgaagtcattgagaccactgtcccttccatctgtttgagctaggcatcatttttgtgttctcacaacttaacgaatgtgagacaatttgctctgtagtgttgcttggtaaatcactttttcactttcagggtatttttcagtcttgtggatgagaggtcttgacaatagtcattaaagatatgatagcattttcacaagaacaaggacatgtgccttatgtctctttgctgagatccagtctgggtggactaattttaacatttttctagatctacactaatatttcactaggagaagtcactatctgcctaggtcagatctgattaagagctagtaaagaccacctcagttatactctctggtaatggaaggatgtgatgttgtgtagttcaaggaggatgggatagaagtcaaccggtttgggtttgctggatggtgactttggttaagtcacttgaaactccaaactgcagattattattatctagtggagacatattacatatctgtttagcttactcccattaaaccaaacatcatttaaaaagcagtgttacagctcttttagaattagtctagcaggttttccagctctcaccagaaaactaaagaaaaaataaataaaaaaaataagagagagagagaatgaaaatccacttaaatgtgaagctaccctgaattctacttaatgggcatgagatgcagggaagtgaggcaagggtggcacaaattgctgtttccatagttagtgtcagttctcttatccttttctttctttctttctttctttttttttttttttgagatggagtttcgctcttgtggcccaggctggagtgcaatggcgcgatctcggctcactgcaacctccgcctcccaggttcaagcacttctcctgcctcagcctcccaattagctgggattacaggcacccaccaccaagcctggccagttttttgaattttttagtagagatggggtttcaccatattggctaggctggtctcgaactcctgacctcaggtgatccacctgcctcagcctcccaaagtgctggggttacaggtgtgaaccactgcactcggctctcttatactttttacaatgtgggtatcttgctgccaaaagtgttggtgtttaaatatactaccctcaatttttgtgcaatatagcctctaaatgcaagtcagctatttctttttttctttttccttccttcccttcccttccctctttctttctttctttcttctttcttttcttttctttctttctttctttcttt

SEQ ID NO: 860 - DNA, 1437 bp, Homo sapiens
atgaccctctccggcggcggcagcgccagcgacatgtccggccagacggtgctgacggccgaggacgtggacatcgatgtggtgggcgagggcgacgacgggctggaagagaaggacagcgacgcaggttgcgatagccccgcggggccgccggagctgcgcctggacgaggcggacgaggtgcccccggcggcaccccatcacggacagcctcagccgccccaccagcagcccctgacattgcccaaggaggcggccggagccggggccggaccggggggcgacgtgggcgcgccggaggcggacggctgcaagggcggtgttggcggcgaggagggcggcgcgagcggcggcgggcctggcgcgggcagcggttcggcgggaggcctggccccgagcaagcccaagaacagcctagtgaagccgccttactcgtacatcgcgctcatcaccatggccatcctgcagagcccgcagaagaagctgaccctgagcggcatctgcgagttcatcagcaaccgcttcccctactacagggagaagttccccgcctggcagaacagcatccgccacaacctctcactcaacgactgcttcgtcaagatcccccgcgagccgggcaacccgggcaagggcaactactggaccctggacccgcagtccgaggacatgttcgacaacggcagcttcctgcggcgccggaaacgcttcaagcgccaccagcaggagcacctgcgcgagcagacggcgctcatgatgcagagcttcggcgcttacagcctggcggcggcggccggcgccgcgggaccctacggccgcccctacggcctgcaccctgcggcggcggccggtgcctattcgcacccggcagcggcggcggccgcggctgctgcggcggcgctccagtacccgtacgcgctgccgccggtggcaccggtgctgcctcccgctgtgccgctgctgccctcgggcgagctgggccgcaaagcggccgccttcggctcacagctcggcccgggcctgcagctgcagctcaatagcctgggcgccgccgcggccgctgcgggcacagcgggcgccgcgggcaccaccgcgtcgctcatcaagtccgagccaagcgcgcggccgtcgttcagcatcgagaacatcataggtgggggccccgcggctcctgggggctcggcggtgggcgctggggtcgccggcggcactgggggttcagggggcggcagcacggcgcagtcgtttctgcggccacccgggaccgtgcagtcggcagcgctcatggccacccaccaaccgctgtcgctgagccggacgactgccaccatcgcgcccattcttagcgtgccactctccggacagtttctgcagcccgcagcctcggccgccgccgctgctgcggccgccgctcaagccaaatggccggcgcaatag

SEQ ID NO: 861 - protein, 478 aa, Homo sapiens
MTLSGGGSASDMSGQTVLTAEDVDIDVVGEGDDGLEEKDSDAGCDSPAGPPELRLDEADEVPPAAPHHGQPQPPHQQPLTLPKEAAGAGAGPGGDVGAPEADGCKGGVGGEEGGASGGGPGAGSGSAGGLAPSKPKNSLVKPPYSYIALITMAILQSPQKKLTLSGICEFISNRFPYYREKFPAWQNSIRHNLSLNDCFVKIPREPGNPGKGNYWTLDPQSEDMFDNGSFLRRRKRFKRHQQEHLREQTALMMQSFGAYSLAAAAGAAGPYGRPYGLHPAAAAGAYSHPAAAAAAAAAAALQYPYALPPVAPVLPPAVPLLPSGELGRKAAAFGSQLGPGLQLQLNSLGAAAAAAGTAGAAGTTASLIKSEPSARPSFSIENIIGGGPAAPGGSAVGAGVAGGTGGSGGGSTAQSFLRPPGTVQSAALMATHQPLSLSRTTATIAPILSVPLSGQFLQPAASAAAAAAAAAQAKWPAQ

SEQ ID NO: 862 - DNA, 62130 bp, Mus musculus
  misc_feature (1)...(62130): n = A,T,C or G
aaataagtctaatattagacttatttctcttagactcccatgattttgtaccatattacctgaattttattattttgcagcatgtcatactgtgtatccacccatctcctggttatctgctgacagacatttaccgtttctgcctcttcagagcctggcctcttagtgaaatcctgtctcaagatagaaacttgtttaaggggagggagggctgatgatgtagctcagtggtagagtacttgtctagtacttctgaggccctatgctcagtactcaataatgctatatataatgcatctggctgcatttattgatttttgcatttgtctgtggacacaaacagttgagctgatgttgctctttggtattctcttagagaaatgctcagaagtagacgtgcctttattggaatttattttggtggcatcatggaagttctgattttatttaggggcctgggtttgtagcacacacttgccaatctgtccacagctggattatgtggaacactgcttcagtgaggtttcagaagtcatcatacctggctgggcactcatcagagaccctgataggtgatgaaacctgttacatactcctggaacagaacgacagggtcggaatggcagctagagccccattagttgcaacttcactctccccagttctgctcaagtgaaattggtcagatcccaaggtgaagacctgagaaggtctgagagggattctgagccaacaaaggcagatacaatttcactcaacataagttttgtacacacagccatattcagagatctgaaaagattgcatgtctgtttgttatcagagcattgaattctgggtaggaaggttaggtctgggtgagccgcactactgagtagtagatgtcctgtcctctgacttctgactctgtgttaggagaatgtgtggtaaaagtaattcacttactcctaggagcagcctcccgagcatgcatatctgggctgcaggatcagtggaggttgagtcaccagctgtggaatgctgtcttagactgtctgtcagtgaagccccaaccctgcccttcagtcaggaccaaagctgtgggaaagttctgactcattcacatttacacttgactcacagaaaacctctagcgtctcattttattttatccaaccaaatgttttgtgtgtgcctgcatgcgtgcgtgcgtgcgtgcgtgcgtgcgtgcatgtgcacattgtgagtgaaatatacaaatgatatttgaggttatttgctgagctcacttttgttgtctctggatatttactccagagctggtgccagggttgggtgggggttgtggggtaggggagctctcagcatggtagtgcaacggatgtgcatctgttagtgaagtgatgcttggaaggacgcatgccattttcatcagtcttcaagaatcctgtgcatgtactttccctgctaccttctgagtccctgccctcacacagcacgtgtatgcatacaggatttgcttgtgctgaagggggttgcatgttctcaggagatggatctgtaggaaaaaggccaattccttagtgggcacttgggctcctctggaacctgggccagacttctcccttagttttgtctgatctctgtatacttctgttcagcctcagtcagggttttatgctttgccattctgtcttcttgttctcttcctagttttcttgtttagagtatttcccataatcagcttgtattctcacatttcttgtgtcttcccatccctaaaggctccattcatgttctatccacttcctttgcagtggtcagagcattgcattctttccatgggccaggtattttgccagacatatctgtctgccatatatatctgttatctgtctatcacttacctatctatcatctgtatttatcttctacagaattaaaaaataaactaaacacttaggattatccttattgcaagagaaaattcatttgcagaaaattaaaagctgcttgaaccaaggtgttaaggttcttcttgtcctgaccaaattccccatgttggttcccctcagaatttttgggtttgactgttagcaccttctgtgctcactgacagcattctctttggtcttggtcaggtgtgttgtacatttggcaatcagtcactgtgcctcattaggaggtgtggctttgatgactattttactgtgttctgttcttcccactaagctgcatgcagactttacctgatgactctgcgtttgtgttatttaaagaggtgcaggagtcagtgaggtatttctctagctatattaacccagttaggcatttataccctaccataatgttttcttcaaaccatccatcctcgtcctctttttatactttgattccatagaaaatacagaccagacacactgtggctggggtttgtatcattttcctgccttgtccttcaccctcaaccaaaaagcagaaaaagtaaatggaatagccagtcaattgaagggttatctgttagatagaccaaggtttttgaccagagtgatagatgtaggcatgctgtagacctatgtggaacctcaccacaagatctcaaagtgtctcattaagttaattttacctcaggacagatgcctctgggtaccttttctagttaagaaataattaatgacttctaattataccacttgccacccagaactcacaactcacccatagttcctgttgacagccacacactagactgctctcccttttccagtggaaagatggttgaagtatggtcaaatttttgaccagatgcaaggtaaataacatagagtttgagcttgtcaagttctgtcaagactcactgggaagtgtgaccatatgtggaaatacaccacaggtaaggataggggcaattggcagaacttcaaatgggtctccagccttgagatgtagtttctagcgctctggggaaccatggttgaccctagaaggtaactatctaggaggggacactagtgaagacggagttctcttgtgttcaggccctacccagaaagttatgttgcagtgtctttagcttcctagtgtgggtgaagaacaattaggtgagctccagaggaagtgtggcttgctgttttatactcagctgggcagatgcacatattaaataaagatgggaatagggaaaaatttactctttgtaattttgttgagtattttatactagtgattttcaaactgtagatccttgttccttagtggaatgtgaaatctattttcagtcttcagcattttaaaagaatattagatggaagaaaatagggtagcattgaaactagtgaatggcacccagtgagggttagactctttttcctttttgcatttttggattgcagtctcactgcagatataaagagtgaacttgcagctgtgctgaaggaaatgggtatggagtagggaagagaagggtggtctcagctctaccggctgctgcagtaggctggagccttgaggtgctctgtatggcaccagtgccatctgctcagagctgtgactgcagttagtttaagacctgtgtgtgtgtgtgtgtgtgtgtgtgtgtgtgtgtgtgtgtgtgtgtggtggatgtgtttgctttgactgggtggaaccctgggtttgatctccagcctggaagaagaaagaagtgtaaccataaatattgatcataatttcttgactgagaaatgctggggtccctggagggaaatttttttcttccattttctctgactttcttatttaaatcttattttgaggcagcagccaacttatgttagatcgcagtagatgtgctggggactttcccagctcctcatctgtctgaattgcttgcggggtctcctaggtggtcttccacaaggctgcagggctgaggtagtcttcccttctgggtactgagtgttcagggaaccatgcaggaagcagagtgcccagctggtggtgttgatgagccatggttgtggtgccagcagtgggggccgtcccctcactctcattctccccctacctactaagaagtgacaggtttgtacctgagaatgccaagtggtcaaagtgtggtttccttcaggcaaagccaagggctttgacggcaagcaaggttctgtgaccttgttttcatgacattgttgaaataacattagtaaaaatttgtcaacttgtggcacaatatactttcccatatttgctttgccctctcccctgtgtatggacttgcacatttgtttgcacatgtacatgtgtgtgtagtccagaggccaacttcaggcatcattttccctaggctgtgcagtgagcaccatgggttcctctctgcccttctcctgtgcttgcctggaagctgggcactaccgtgctgttccatgggtgctggaaatctgaacggagctcctcgcgcttatgcagaagatacttccattggtagggagccctagagcccatccagtactttttcaccttgcagaacttgagtcttgagatcctagaaggtttgctcaaaactaggcaagacctggccatttgtctctccgggacaggctggcgcagagttttttgcagccttccctgtttttccgtaatatccactccttccagttttttcctatgtgctccttccccatcttcctggtccaggctgatgccatgctgggcgtcctttcttttcttcccgctcttttccagaacagttgtacacctatctccccttctcagttttgatgtttccaggctgggagctgctcctctcccaggtgacatccaagcccaagccttacactgtgccttcttgacgacacactccctactgccagttcttggcatcctactaagtgttcctccagatagtgaggctcctgtttgttttaatagctggaagtaagcctcaaggctttggtgaacatgctgtgttccctgtttgtctttggatctcttgcagcctgcatcttttccaggaggaatccagcaaggcattggacaaggaggtgtgctacttactggcagttgatccctggaatgtcgtaagccaggccttttcatgtgttgaaggaactgtgaatcctcaatattgtcaaagatttgaaagcctctactagggacagaatgtgtaaataaatgctaggctttattgttatgggacagatgcttcaagtactttagataagtgtctaggaagtgctgagtgagaccaggtatctgtccatcgtctcccttccacccctcccccagcaccatttagagacatggcctcattatgtaatccaggcttggcacttgccttggagttctggctgccttcaacctcatggttattctgccccctcttcctaagtgctgggatgacaggctgtgctgccaagcctggccctgcttcccctttctgcttatccacttctgccaccatagttttgacctcgaggagaactgtggagatggcttctctaaatcttatcatggcctctttaataacattatagatacattaatgctaattagtttaaaagagggaaagtaaagcaaaatggagctgcccagcatcttgatgcagtgtggcttttaggaagacacttactgactttaattaaacaaagtactgtttgctctgtcagagacctcctctttgactaaagcaggttctttgggaacaaggcagagccgacccattgacttggcattgatcatttgctcatccctagaagtttattgtaaatgaagcagcatttactgttgtgtggtattcctggaatcgctgctatagttagaagtaagtgattctgtgtgacaggaatggcatagagaaaagctataattctgactcgttgacagggaaaaatgcaagttttgtatttatattatgtcattctcttggctagaatccagcagctttacggtttcttgctgagctctcagcagaatgttacccatctcgaaacgaagtgctggggtctcgggagagacagagaaagtctttctgtaatgctgtgggtaggaggcactggtcgtgcaactggaagacagcagatggttttcctggcctgtgtgtgtgaagaccttaagaaagttccatgtccaggcaaggtaggcctgtgttgaggaagcagaacactgctattcctctagggtggctgccatgctggaggggtgggctggagcatagtcagggtggggcagttaatgactttgcagctcccgtttgtttgctacagggccttgctgtacagaacaggttaacctcaaacttactttgtagcctatgctagtctggaatttgtgagcctccaagcctcctgggtgctagattataggcctgtgccagcacacccagcttgatgggttctttttgacagtacctttagaagacttgcaatgacatcagtgtccgaggtggatgctagattgaaaactactaaacagccagagaagacagggtggtggcgactgaaggaaagggcaaggtccttgagtccggagctgcacattaggactgctgtccctcatactgattagcccaacatagctcagacttcctacagattgaagttccagtggtttactctgtcataatttgtgaagtcactttgtgcatattggggctcctccttgaccagaactgtatccataaccataatcagatgaacagaaattatggtcaaaatcaaaggtttcctgagagttgaattctgttttgtgatatttagctcctgccggtcctgtgaaataaatcctatttttatctcttcacttgtactgtgaatattgaggatgttaagtaacttgccagggaagccagattcaagtcattcaggtcactagaactccagcctttgtacttaaccttcagcagactattcctcagtgtgggaccaggattctgtttattctgcgttcttcccagcaggctcccagcctggagtattcgaaattatatatatgtattttttcattttctctgaatttgtcaacattgtattgctattttctgctttagaaaggtttttgattccttaaaataactcactgtaggttagatcttatctttttgaaagtcagtatttacaacagactggactctaactcaaagaggcatctgcctcccaagtgctggggttaaaaggcatctaccatggcacctggaaagatagtctctgcagtggaaatcacctaggacatgcagtgttttgtttagatttttatccttgatttagttatgactcagtctttttgctagacaaagctggcattggcctttggctcgggtacacttgatgatagcgttctggagcattagaactgtctagttcactttctgttttgccttccatctaaaattcagtagtctctgtatcccttatacaaatattaaaacttcaggagctatgtggattgtcatatagaaggtgctggaactttgcctgtttggaagtggttttgagttggctgtgtttagactcacaaaactgttttgtttgttttacttgtccatcagtcagaaactatcagagatactgccacatacataagacggtgataaagaatcgagaagtctgtagaatgtctctgatttctgtcctgcataaaccaacaaagtaactctctaccactgaatgacggctatttttcttttacatctttgcttgtataataggcagacaagctcactgcttttcacctagacactatgggttgctcatctttattggttccattttctaagcttgacaattatttgaagttctcagtaaagtgtgtcttttaaatgacattctatgattactgctggcccgtgtttttggcacagcagatgttctcttgtagtgagaaacttgacttggtttttgaagccaatgaatgattttactccttttctgctttctctacaagtgaccaggtaaatcagagtctggcttatttttgaaatgtttcttggatgaagccattgtacaaatgtaacaccaaaatgacttgtcatcatgaataggggcagccatcctttcttgaaagtagatccatagtgctatgcttgagttgcttagtgtaggtctgagcatgctttttaaatgctgtgtgacttattttttattattagaatgtcagttctctaagagttcattgtattaattcagcatgcaaaatgccagagtaaaattgtgtactgtctaagaatcctgtagctaaccttgtttctcagagttcagattgtcttacaaatctgagctacagcactggaggtcagcttgaagatgagatacactagtattgctgtttcagatggtgctttctggatagtgctgtttgcagcagatattgaagaatggtaaacacgtttgccatggttataggttgtcatggcatcctggttgtaggagcagattagtaagtactaaaagtgtctatgcagtagcccccatagaaggaaccttggcctggtgggaccagtaaaatctcttctgctctaaagggctctaagtctatgagcctttcctggtttagaacaagtttctttgtgtttgaaagcagagttccgtgcctggtaaaggcatgcagctgtgcccttagcaagttttgctcatgcccagtgtgaaaaggaataatgtaggcttccccagacgagcgttctcactgccagcctttgcacacgctgatgcttctgctcagactgccttcacctgctggtgctttcaactttcctctctcactctcttcccaaccatcacatttcagttctgtattcctgcttccctgagccccaggctgtatcacactgtgtatgctgtctgtctgtctgtctgtctgtccgtctgtctgtctgtctctgtcttgttctactgttctgcaggtgataagctccacatgggcagggaccaacttgctcttttcctagttagttcattttacgatatggaaagccatgcaaagtggatggaagacttctaactgtggcttttgaagccctggttctgcacaaagcacagacttatcatttagtgattttccagtgtcacatgaaacagtgtatctactagtagtcttcaagcacttgtcctgtattgtcattttttttaaaggtaaaggaaaactgacttgttatttcagtatttttgaaggtacttgtatcctagttgccaaacagaagttgtcatatcaaaatttacacacaaaatttcctgcttggcctattggttattactttttaaaaacttattttatgttttgtggctagaatattttgcttgagtatatgtttaagcatcatgtgtttaccttcagatccccaggaactagagttgtggatggttatgtgacacatgtggatgctgctgtgcactgtgcaggtcctctgcaagaacaaatgttcttaagtgctgaaccatctctctagctcccaccatcaataatttttactaaagcctcagccaatgcaggaaggattcttctactatctctagcctatcagcaaatgagtgggaggaacacaacaggtcctgtggtactctcttgcttttgggtttttgttcatgttgtttcccgtggtgatgatgtaagatgatggagactgctgctaaccactttcatctcttgcttccttgctcatccctgccttgtgctggccagagctgtacttttctacaagcagattctgataaaaatgttctaactaataaatagaagccaactttgagtccatccactgacagctgctgttggaaagaccctttgtagggatgagctcctttggtgtctgcactggcactcctggcatcgggagagaggcgtagatggctgctcagaggacagggcactctacacctggaagcaaaagtgctgccttcctttcttgactctgccttcccagtgtctctcttagtcattgcctgcccctttcttctaaatgcactttcctacacgtatgggctctgctgtttccttagtgaaaataccttcttatttttaaatctaataacctctgatttgatttatttttgtctctagatcagctctgaatgggctttggaaggtaaagaagaaaatccagtctgctttcagggacactggacaaccgaataaatgcaggtatgcacatttccttcttttattcttttaggcagggccttacttggaagtccatactctatgaacttaagatcctcccatctcagcctacctagtatagagattatggctatactattgcacctggccttaaaccgtgacacccagcctgtagaactgtctgtgttctgacctgactgtctgtctaatctgtatattattcattcccagtgttggatatgctagtttaaacatttcttcactgcaaaaatccaggaagtaaagtgaagttctcttgtaacctctccaggacagctatactgttaccagggtctcatctgttcttctaggtttcaatgcacgttgttactctcaggccccagtacacctgttgtgctctttcactgaagtcatccagtgctggtcatgtacctttatgactacagttccagcagctggagagataccttgtatagtagaccctctcctgtcagaagttatcactgggcattttcttgctgttgctcatagcactatctacaaagaatctctaagacagagatttcttttgccttacactgtgaagcaggcttaaaacactgttgattttcatcttggtttttcagtgtgatcaagtgctgggctttttcacctactgtagggtaagtcattagcttagtcttcagaccgatttcaagaagattctggtttttagattacttgggatattataaattaaaattgaatacctggatggtgtcccttttaaattatctcgcttcctaaccccacgacagctgatagactaagcaaatggatttggtgctgagagttacgacaggatatgctgtgtaggactcctcatgtctggggagttccttgtatcctctcccaagtgcccactgtaggcaagcctctctgtttcatactgggtataaaagataaatacagctgttatgctcagagattctcacacacacgcgcacacgcacacacacacacacacacacacacacacccacacacaggtgtggctagtgtgattactttgggagcacaggagagatagcatcagcttaagggtacaactggggcccagtgaagcaatcttgatggaagtgctagtgtgggcagctttctgaagattgaactttgccatgaagggtaagaggcaagtgtatttcactagtggaatcattatatgcagagatggcacagggggaagaatgggtggtgtgaagagacaggatacctggtggcttgggtttcaagcatctagaagtgagaggagatggggtgaggggccagccaatcaggagtgtgtagataatgagtaactagcagaaggtctgatctgtgttactgagataacacttgggcactcaagtgaagctgaggctggcaggcaggaaggaaatactttggggacaggaaaatggctgggaggtcattggtgttgcaagggctgcaaggatatgtggggttccccttgctctcttcctccgttgcccttggctggactcaatgtccaggactgctactttagtcctggcccacttgttttgagggccttgtgaggttttcctgcaaagagcttacctgtgggtctttccttgcatgagatgcttgtcttcctgcttccctccagtgacagggacctgtccctagtcatcaactttcatggcccttccatgtgatttatagtgcctgagtggtagtcgctttgtgtacagtgcctcagatgacgacaagaacgaacgccgagaccggaaagactaattctttctgttggttgcttataagttacatgaccccaggagaggcagcaatattcagtcctttaacatcagtgactccagaggagagcttccaactacaactagtatgcaaatacagaagataattcaaatcctgcttaagattattctgactgttgagaatatggtctggctacttagttactgtgcataactaattatttctatggtttcatctcttataagtctggtctcagtattcagaaaggaaaagcctaggagttctcatccagtctcacagatgcctgcttgctttcctccatagcaaacagcacatggaatgactacattgtctgctcttccttcccgacagtatctaaatataaaagaggactgcaatgccatggcgttctgtgctaaaatgaggagcttcaagaagactgaggtgaagcaggtggtccctgagcctggagtggaggtgactttctatctgttggacagggagcccctccgcctgggcagcggagagtatacagccgaggagctgtgcatcagggccgcccaggagtgcagtgagtactggcagcagggctgggaggctgcactgggacactgggagaagcacatgtggagcctctcctctttttatttctgctgagagcaaggtgtgagttctggaagccagggtcctgccttgtttcctaatcctggaccttcacttctcactgaaacgtgtatttctcccttatcattaacaagacagctgtggaataccaaggaatgacccttgccttctgtaaggctcagtcttgtgggacaggctcatgttatagttcaggatgttctagaactcagtaaatagcccaggctggcctcaaagctgtattcctcctgataccgactgggtactgggattacaagtatttaccatcacactcagccaaagctctgttctctgttctctcacagctctataattgagatgccatcagcactagctgaggttctgtgcaaatgtgtatcaattcagtagttctgtttcctaacctatcgctgaacattcagattccttgagtttggcccggtctcctcttacttggtcccttctgccactttgaagtgagaattttagggttgccccatggcttggtcttgctacattgtgaaaaggacacaattcttttaaaagtgagattggtttataaaaatgcattatgtttgaaaaatgccatgatgacacctttgtatactaacctaaaaattaatttttaaaaaaagtgaggcttgctttacttaaagttagcccattgctaatgtgagagatcaaagtacctaacaaaataaatctcctttcgtcatcctccagcatggaggtgcatggtgttcacccacctcattttatatggaaagtaaagtaaagccaaagcgccataaaacggccacctatctcacacatgagtttactcaagtccattggaatatacatgtaggacaggtgggttatagtggcaaactgtattccaataaagccgtttggaaaggattgttgtagatctacttatcgtgatgaggttaacttgctgtgatgctgcagagcctgggccatgctctgcctaggcctttagctttgagagcaacattgtgggaatgttgtagtcagtttaagatcctgctagtaacatagcttgtctggaggcctcatttacttcccgatacacatcattctgcctaacgtgctttacacaccagaacaccaacagaagggtctttatgttacaggggaagaatatggtaggctcttactaccctagtactgctacatggcattaaatggacagagctctgtgtaatgtgggaaaaggaggccgtatttttaagtaactctcactagacggtagtttgttaggatctgacagtagagatatatgttcctcagaccagtgtgtagagaatagatggtaagtcttctgttaatttgaaaatacataaacactgaatgtcacagacttttatagctctcattggtgattgcagtaagtggtatggggcagtgcgctttcctttacactctcacctaactctcggaaagtttttcttgtagctttcgttgtttggctcctgataggcccagaagcaaggcatctatttcctaatctgtcttccccaccaggctggttattattaaaggagcacagagtgtagtgggaaggcggaacactgttgggccagctttgttaagaattcttcctgctagttaatatgaataaatacattataatgtagagagtacttaagtgtgtttaaatattaaccataatacattttaatcactgacaaagtcactgtgtttatttattctaatatgtagtttgtatggtggccagaaacaactttgcatatataatgtatagtcacactgtcagaattgtttaaaattgtagggaacaggttgaggaattcctaccttcctcagatgtctgttcccttgctgtgatttaaaaggggcacatcagatggaatctgtgggcctctgagatagcccttttttcttttaatccaagtttggtaagactgctgtaatgagaactgtatcattttatttttaaatgtctttaatttggtttgccaggagccaccgtacatgctcctagggagctgtgattcttgattaacatgattaaaatcccctgagtgaacatagctgagagttgcatctgcgctgagaggatgcaggtgacagagattgtttctggatgagagaattccttatcgttgtgtgttgctctttgggaacagatggccaagtgcatctgcctgtaacttagccatgtcctttcttctcaggtatctctcctctctgtcacaacctcttcgccctgtacgatgagagcaccaagctctggtacgctccgaaccgaatcatcactgtggatgacaaaacgtctctccggctccactaccgcatgaggtatagcacagagagctggtgccagagggttcctcgctcgtgttacctggggcagtgtttggccggggccccagtcacttaggaagaagtagtagagttactttatttgtttgcttctcattcaagaagggacaccttccgtgttgcagtgcgattcagagtgaatttgatcacctctcacgttttatagacatgatatgaagattgttttagatagagttcaagccttctagcagttttccacgcggtgagtcatggttgtaggtttaacataatgggttataaccagcacttgaaaaacaatagaaagaaagaaacaagaactaaacacacacacaccctcctagtattctaaggtcattgtattttaaaacttctgaggtgtgaaatatatatgcatatactaagttgtgatataaaaatgtttcctactaaaggctgtggctaagaagcatctgtatgtcacctgaagaggtaacagaaataagtgctcagccctcctctcagggagtggtgctttgatccactcctgacaacattggactctcgttgctcttatccttcgtgttctgatgagcagttcacttttctcccacaccagagattttgttaaatgtcccaaggtcacgtagacggctggtgcttccattcatatacacacttttgactttgtaagtgtattgaggaaatgttgtgggaatgaaaccattttagatggcagtgaagcacaagctaatatatgcttagccatgaagcttgtaagtaggctaggccctttctgaaaagaaccttgagctgtgtaaatatggttaaggcagtagatcacctcagacactaagaaggtgccaggtcaccctagaaacaccttccagaatctccagggtctccagagtactccatctgtcgccttcgttaagtgttggctgtgtagcaccatgccagtctgagaggctgaattctcttctggcactcatctaagctctcaccttgtggggaagctgtgtgccctgtgagattctgacctggctatagagggcccttcagccctcccagctgagccttctcactatattagtttctttttctcacgctgatcttacttcccacagcctggggctagttctgtgatcaaaactgtgaggtggaggtgcagctagaaacttagacagggacatgcccttgaggtctaattctttcccagtaggctttttttttttttaatacttagatcacagtccagtatggctgcatttagcatttacaaaagacgtaagcttgcctgactcaatgctcccattattccagaggaaactgatggactccaatgagaaggatttggtgtgcagttccacacctagtaaacagtcttggtagtgcggcaggggcttgtcttcatggctacatgtggcgttcagctgctcaccattctgttagctgctaggaagtgcgcagacttcagttctgtcacctggactttacccctgccagtgtgctttaacaggatattgctttgttaccacagcctctttgaagctggggaaagataccaccctcagtgcagacatttgtggtggaacagtctacaaagagcttgagagctggtactctaaccacggaagaagtgcagtaagaaaacaagtctagtgactgtcacagggccatcccagctctattttagtcatgcctttctcttttcacttaatgatgtggatggttgtttatgatgtacgttaatataagacagccatattctttacttgtattcaaggaaaaataaaaccacaagtgacaatcaccgacttcagtaaaattctgtagaaacttaaacttctcatcaggtccagagtttaaatgtaaaccaagaatgtgtactcatctctagtgtctctctggaactgtcaggttctatatggctggtgtgttgctctctccttccttccttccccatcatcctgaaagggtgtgtgtgctctgtggatgccacactcactcactcccactccgttttaactattatcgtattatcaggacttacgtatacaaagttcagtaagcagcatggtgttatgttggagctggcctagtcagtgaagtgcttgcgagggcctgggtttgggtcccacccagcaccaatatacaaagccagacatggtggcctagttttgctttattagcaattacggttttaatattggtaatcatcttttatttttaagtctggaacagttcacagatgtgtgtgtcgcccttgcactggatccatgcttatctctgtatcgttccaattttactatttgtgctgacaaagcaagcaccccacccccaagcgtatcctaggcaacttggctagccttgaactttcagtcttcctgcagaagccttccaaattactggaattgtaagcaccaccactgaacctggctttccatgtaaagatcctagatggatgtggaaggagtgtgtatgggctggattggttcagagagcagctgtcttcagtgcttctctcagcaagcttgcagggaactgccatgctgatcatgatgctgtggccctcacatgctttttatctaccagaatgtacctggcctatgtgctctgcagtcagggccctggttgaacctttgtagctggccaggtgggtcattcccttcctgcttatgggaagagtggagcttcactgactcctttctgctgtgccccgttcttgtgaagagtatactatagggcccaggcccacataagcatgtcactgcactggtgggccctaccaattgaaatctggtctcctagaacatacatggaacttaaggggatagtttaccatctgctttggagacctggtgtagtttgtgcagcttgtggttgtttctgcattcaagacactgatagtcagtctcccagttcctttcatgagctacagagaagacaggctgtacacaatcatggaaagctacaacactgttttttaccattaaagtaatagttccatcctgccctgcccatgttgaccctactccttgagtttgttgtttatctgtaaactggcatcacagacaaacaacaagcacctgctctgtggctctggggatttggtgctgagctagacagctgtggcctgctgtcagggagctcttactttgcccacactgtttcaaaatgtacctgtttgtttcctagctaattcagccagtcatcttgttcttgcagaagcatcttgcctcatccacttacctgtttgccatctgtgttctagagccaagcatgtccaacctgtagcctgcaggttgtgtgcatcccaggataattatgagggtagttcaacaaacttgtagatgataatgttatattgcaatatcaaaaggttggaattctggtatggcattcattatcctggacaagttacctattaaacatggtgttaagggctcaccgtattatcaggcgtccatgaaatgctcatgttttatttctaatcacattaaactgagcttaagtcaagctgtgaaatgtaactcttgacagatatttatagaggaaaagagatgtggggcttgtgaacagtgcagtgtagttctgcttgtgacatgtgtcccacttcctgttgttttgtattattgtggggcagggaactcagagggcagaggctatgcccgagagccctctgtgtccttttctggctctgttgttgtcgtcagactttcatagcagctctttagggtgggagttgttcattgcttctcagtgaaatggctgcttttctgtcaacttactggcatatttgggagagagccccagacagagccgagtctgtagcctgaaagacagctggaccactttggttcagccactctcagacagcttagaacccattctgtctccccaacaggtagcaggccaaaggattagtgagtgaggcttggagggttaggtcacctcacctcagtgagcttgagtttttctcatctgcatagaggaaacgatgaagtctgcctgcaggttttgctgttaggagtaggtggatagaggggaaagtgctgctctcttttagcgggtctccacacctgatgattttgtgtttcatttttgaagctttgctcatcgtaaaatacatcaccaattcagtaacagccatctgagacccgagaaacactactatattagtgttgattgtaggacagagcttgatttcagaagtggtaggaccacaatggagagagctcaggccgggcagcccagcagaactagagatgtgaaggagcagctagctgtaggtggcaggtggtgttttcacctaggaaggtatggaagacattatgtaggtcagcagaattgtactgtgaccaccaggacatcattttatcctcctgtcccaagagaggtgctgaggtacattgtgacagcacacttggaagagagagaagggatgttgcctcagggtgatgagagttgagggtgcaaggctggtgtcttcagtttcctcagggcagttcagcttcagcaagggctactctagatagatacctctcccagatgagcagtccagggactcctccaccacatttgacatttttatactgtcttttaggttctactttaccaactggcacggaaccaatgacaacgaacagtctgtatggcgacattctccaaagaagcagaaaaacggctatgagaagaaaagggttccagaagcaaccccactccttgatgccagttcactggagtatctgtttgcacaggtagggagcttgagctaggagatctaaagtttgtgaggagtgtgaggcctggtggggctcagagtccctgtgcagttgtgcttagtggcactttatggcctgttctcagatgcccaggtgactgggaaggccgtaggctcctagctatgggccttccacaccagttactttctttccactgctttctaccactttgcttatcagctgtattctacatgagagggcacagagtagcttttgaagggaagtgaggtagcagccaggccaagagaggctggaggtgcctggaattgcattgcttcgggatagctagcatgtttgatgcaatgtttcctgatttcaatgtcaattttctattaccccatgtatactgcatttggaaataccataatgcccatgttatttataaaccgcatctttattcatcttattttcatcttccttctcattttttagatatccattataaatagtgatctggctggacatggtgatgtgtacctttatagtcagaggcagaactatagcaaagttgaggccagcctggtctgtatacacatacacacacacacatacacacacacacacacacacacacacacacagggccatggttattgtgagatcttgtcccagatcgactcatctttaatggcttcatatcaattcattgatgtaacatcaagttacacaggtgtccgtgtcttgtttgctttctgcggttgtatttgtcaagaccctgggtacttggacgaaacaatatggtttctgtgtgcccccattatatcctcaagtgagacaaaaagaaacagtgagtttgtaaatatcacatagatagtgcacagaaaatcatgagggtcaggcattccatctcagacttgtgaagtgccgtaatctcagcactttaaagactcaggtggtgagtttgaagtcagcctgggttacacagtgagactgacttaaacaaaaaagagcagaaagggacagactttagtgatagagcctgtggagcggcttgaactgggagaactcaggaagaaaggaggagattgccctgcttcaaggatggctccatccttgctttagagtctcaccttcaggagactcagtgtcagttacttgaggttagagcgctcacagtcaggttctccctcctcttccaagatctcagcatccatcagagttcttgctcctccagtactgttggtataaattcttgttctttctcaaaactttgtggaaatggccagtgaccttgctttaacctgaaagaaaaaacctcctactatggacagaaagaacttcagcctatctcacccctaagaaaacaaagcaaaacagtaatgtgaaactgagaagtgctttcaggggaagtgagtcagtagaagccactctgccagatgcgctcttgcctggatagaaagcagctgggaagctcagcctcctcggcgtgggaatgcctagcagagagtggtgggctgtgggagtgttgaggaaaggcgccctgagtcaggatcgggctcgccttttttttttttttttttttttttttttttgcaagcatctaacattagtgcttcctgtttctcttcttcagagcggaccggatgttgtgctcagttagattcctcccctagtgggactctgacagggctgttgtgaggactaaggtgaagtaaaggaacaactcccatgtctggcagggagggagcttagcggctagggagtgtgagcctgcactgcccatcattgctctgagcaaggctagctgtgggtactggttctagtccagttttacatactttattttattttttgtttgtttgtaaagtccccattggtttgtggaatgctatgttcctcgctccatctgtgagatagtgtgctctcatggcgttcttctgtactagaaatgtgaataacacatacggaacaaactaatggtttgtggtaatgatgctctgtggaatgtaactccttcccctgtctccaaacccataatagtacatatttatgaaattaatgctgtcagcccgtgtcacctgccttgcagttgagacctaatagtcacagtgtttaggcattgttaatttagaggccccatgaaggggggggggggggcgctgtgaatctgtgttcttcaccagcaccttgacaggtactcagtaaatactcactaaatgaatggatgaatgaatgaatgaatgaagtcatctaggagaacatattcttagctgccttgtgctccacttgagtgggaacagccttgatcctggagacacactgatgcttctctttgctgggtggcattttggccagctcttctctctaggtcagcatggtggctcctgaagcttaggtggtgactcagtttttctcttctctgctcccaagggacagtatgatttgatcaaatgcctggctcccattcgggaccccaagacggagcaagacggacatgatattgaaaatgagtgcctgggcatggcggtcctggccatctcccactatgccatgatgaagaagatgcagttgccggaacttcccaaagacatcaggtacgccttcctgatgatccgagtcggttgtaggcacctggtactgatttgggacattgtttttgaagcacagtcttgctgtgtgtagctcaggctagcctcaaactcatgttcttccttcctcaagtacctccaagtactgagattacaggcatgttccacctcacctaactgtaatgctattttatatgctttcatatatcttgtttggctgctgcactgtttttctgacatctctttgcatgaatcaaatctttgaatatttgtgctaagtagcacattgaacattatggcttgatatgctttatgctaactgataatctcagaaatgtgaactagagtgaaatatccaggcagatgagtgatctgcatgtcctccatgcttcctgtctttcccatggtgatactgctgcctgttggaactgccttctttaatctgcactctggtctgggagctgttacttctgataggcgggacggtcagttatttgtttcagaaaattttatataagtgtgggttgagattaatattttgtctgctcagtctatctctgaaattgaatcatctttccactcaccaatgagctgtgagatagcacaagctgcgccggtggcacatgacttggtcccagcccttgggaggcagaggcagaggcagaggcagagacagaggctggacgatctcttgagtttgaggccacctggtccacacaggaagttctaagacagccaggattacataatgagactgtgtctcaaataaaaaaaaataataaaaaagggctgaaaagaaaagacaatcccattttaaagagcttatttacaaaggatacagcacaatgccagagctgtgtctcacatgcttgagctcctcgttccttccgcagtaccacagaacggggttcacccccaggtccaccgctccagtatgaaaggagagtttatgagagtggtatgcacatgtcatgaggtgatctccttttctctttgtgttgtcagtatccagtcgctcctcaggcaggggattagacattttccaggtcacttttatgtgaccttcactccttgtgttttattttttcaggtggcttaagttgacaactatcctgtaattctattatattacttttaagagaaaaactgtactatttgctaaagattggtctgagaattcacagtatgcctcagtattgttatagggattctttgggccagtttacctttgcttgtcccagtggacaaaatatagaaagaactaaagtaagcccttgctctttcaggggtattagtcctggtctttttcagactatctcctgcctgttagcacggcgtgtgttgagatctgattgctagagagcctgggacaagtaacgaagcttggggaacttgcacagtcacatgggagatactgtttgtatctgacatttgtgagtttttaatcatcttcataagaaattatataatttttagcgaacaggatgcagacaggcaggcagcgtagaatgtgttaatctccagaggagattaaggcacagcttgatgcttttcagaacattctaactcaccctgaagcaattctctctatgactgaggatagccttgaactcctggtcctcttacctctaccccagctccccagtgctaggattacagatgtgaacatgatcccagtgctcagtttacccgtgcatatgagtgttctaatgtgcacagagccctaaactagcaagcagaaatctagatgactcagcttttttgtctccgttgtgccaggggctccagttctcctgacatttgtggaactcgtgatgccatgcacgctctctgtcaggattgtgtcttatctcttcacagccatttatatccgtggtcctcagggaatagtcactgttttctcgtttgcctaaacatacaaggaaagtcatagaggcagacttctaatcatttcttgctaacctgtatatataaaaattattttcttttagctacaagcgatatattccagaaacattgaataaatccatcagacagaggaaccttcttaccaggatgcgaataaataatgttttcaaggatttcttgaaggaatttaacaacaagaccatctgtgacagcagtgtgtctacacatgacctgaaggtgaaatacctggctaccttggaaactttgacaaaacattatggagctgaaatatttgagacttctatgctactgatttcatcagaaaatgaattgagtcgatgccattcgaatgacagtggcaatgttctctatgaggtcatggtgactggaaatctcgggatccagtggcggcagaaaccaaatgtaagtgggtgtgggtgtctgatctaaaaaagagaatatccagggtcatcaagggaatgtgctgttgagcctgtcagaatcttaacctcacctcgtaggctacattaaatcaactcagctggaggccactcatctctcatcactcacaacacaactgtggcacagttgaggcaggaaatgaatctaggcaggctttgacgtcatgaaatagataactcctttgtgttatgaagcttgattgagtgttttattgtactggggatcgaatcaagggccatgagggccatgagcatgctgcagacccctcccgcacttttacttgtaattacagtgctgggaatcaaatctagggcctgatgattaggcaagtgatctgctgctgagtgacatctgcagccctttgtctttgtcaaatgaggtaataacatgagttgaaatctaaggaggcatgtttaaatttcagctacactccttgtatttaaatggccttaggagggttattctacccaagtaggtgcatgggactcatctgtcaaatggagatactgttgtctcttagtacctggatgcaggtattggtcaggattctgtgtagggaccaaaatctgcctatgctcaggtctcataggtaatgatacagtatttttatgcaacctgtacatccttctgtatacacttgttttttccaggttgccttataatacctaacattatgtaaatgctacataaatacttacactgcactatttggggaataatgacaataaaagagtctgtggaacatacaaaatattacaggcctgacattttgctcattggctgttgaatctgtgcacacacacttggaggacgtggaacccaagaaatcaattggctgactgcagttactatatctgattcatatggttgttcagagagctagatggtgtgttgacaccaaacctggctaataataacaactgttgtctgaattactgtagctgcatagttattactacaagtaatattaaatataagattaattttctcctcctgctttattctcatgctaaaataacaataccaagttaccaagtactttctgcatagtaattaacatatagataggcatgtgtctaatctcatgaagagtgacattaaaagttgatattttatggctgggaaatggtggctcagagatgtcagggagttaatgtggaagctgtcatgcagagctcatgctagtcagctagataactttgtgcacgtatgtactctttagggtgtcagttgttgagatgagttcctatcatctcttgaagcctcacttaggcactagtctaaagtgaaaacatgggtagcaggaggagcttgggttttgaccatttgatgtatttgggaagatctgctgtctggctgggcacagtcagtctggagttgaggaggcctgcggctggtacacatccattaagccctctccggcatcagcatgcacactataaatcatgcaccgtgctcatcaaggactcttggagaaccaaatcccaggattctctggtgtttgtaagcccatgattccctgcatttctctgacttcaggcatgctggctttctcttctttgggcctttgccctatatgaaattgctagaagcactgaccttttgccaacagaaaatgagaaagctaactaaatcctgtcacttttgttatcttatcaggttgttcctgttgaaaaggaaaaaaataaactgaagcggaaaaaactggaatataataaacacaagaaggatgatgagagaaacaaactccgggaagagtggaacaatttttcctatttccctgaaatcacccacattgtaataaaggagtctgtggtcagcattaacaaacaggacaacaaaaacatggtaagctcgctcgagacctgcccagactggatgtgctggtgagagactatgtggcacatgatttccagagtttgctgtccccagttaaagctcctttgatggtccctttgaagccagaagtctcattgccagcccctttcagtgtctgctccagagttccactggcacatcccaggtgcttggctcttacagatgtccatccgctttagggtttgttgaccacataaagacatttcagtgtcagtatttagtttataaaataagtgagtggtgggccagagagatgacccagcagttaagagtaattgctattcttccagaagaccccagtttgcaagccagcatacatgtcctgtgactcaaaaccatttgtaactccagctctaggaaatatgatgccttcttctggccactgtgggcacttgcacatgtatggcaggcacatatacattaaaaagtggataagaaggagaaagaattagatcagttctttctttattgtaccatgttgatgtggtagttggaggcctgtcctggataagagcctctgtttgtggccctcccctggccctggtaccttatttcttcccttcagttgcttctgctgatctaattcctcccagactccacctccctagatggtctctacctctctggattctcttaagagcatagatccactatacaaccagacccacattcccaatcccagaaattaccagctgcccatttgtcaaggagcaaatagtgggggaagagaagggactctacaaggacaaggtcccagaaagccctgtgcatgcatgcactaggaccctagagcaaagctggatccagcacctggcctctttgcactgtctgtctgtctgtctgtctatctatctatctatctatctatctaattttttttctgttccttctgtctttctgatgtttgggccactcttgtgtgtcatagatcttttcctgaagtttattactataggctctgtccattcccaggcagtttcatactgttaaccataacttaacctctgatcttaaaaggaaaagatggagcccacagaggtgtgcctgctgagctgggtagaaggaagtcgcactgggctcatgagtaggccacagagcagccccagtggtgtcaggctcacccaggggctcgaggacagcagagagggtgttatctcgctttgtcttttctggtatcacttgaggacacagcttagacaagcaggccagcttggcagggaaagtggtaactcttccaagtaaacatgtttttgtcgtgggaagtcacccctgataacacgtgttgaggccaggctagtgtgacagccatgcctacaaagtgaaggccatcagcaccagggaaatcttgttttgcttaaaacaatgacagaaagataatgcacagcgcaaggggagagcccagtgaggcagcacagagggccactctcccctgtgcagaggctgcctttctgacaacctcctagaaatcagtttgacagcctatggcaaaaatcttgaaaatatttctgtgggttccatttaggaacccagtgaacatgttttccggaaactatgaggtacagacagtggcttatgaataagagtattcatgtcaggtctctgagttcaaagccagcctggactatagagtaagttccaggatagccagggctacatgaagaaatcctgtcttgaaaaaccaaaaaacaaaccaacaaaaggggtttatttcaacagcatttgcagtcaaagtactacaaacaacctgggtataaaatagaaggctactcttaacaactttccaggtgtcagctgtttaattaccatgttaactcggtggtggcagaggtcatccctattttacagaggcacagaggttaagtgacctgttaaagacacaaattgttggttaaacaatttgaaattgccagtagttgcccattttgacctataaaacatcgagttgaatatgtttgagcctggtagcaggtggggatgctgtgaacttgaagaggctggttacagagcctgcggttcacactgtgcctctctatagatccgccctttgagcaggtagtacttggctactggtctttcatgaaagcaggatgccagcgtgttaccaagtcttgctttgatctctccatctctcacacacttctcaggcttctgctatcaagaaaccaaggtgcttgtatgccaggtggggtctgattcagcccgccacccccctgctctagagcatttgaaatttgcttttcaaaggtatctgaaggtcgatgccagccagtggagtgaagtaattgtggtgtgttttctctcaccaggaactcaagctctcttctcgagaggaagccttgtcctttgtgtccctggtggatggctacttccggctcactgcagatgcccaccattacctctgtactgatgtggctcccccactgattgtccacaatatacagaacggctgccacggtccaatctggttggttccagaattttctcaattacctttggtgtgaaaagagcccaggttttagaggtagaaagtccccttagctctgcatgtggccagttgttgagggtggggtgagtggccatacacttggaggctgtcttctttgtgaagtatgctacttgagcccccaccagcccttcctgtcatttcctgccatggctcttagagcatgcctcaactactcccttaatttgatctctgcttctcatagattaaccccttcacttctccaaagccaactcctactctgtccaatactgagcacttgaagggagacaggaatgcagatctttaaatcttaagaatggtcctcatctgtattccacgtgacaggtttagcccccttctacccatcatgctctgtgccctttgggcatcaagactcactgcatttgggaatacagaggaacataaagtgtgttctctaatactcttttactcaccactgaggtatttattctgcttgtcatcaattaagctcgcagtgaaggaagtgaacccaactgccccaacgggccaagtgtgggactccactcaatccttagctactcttacttcctagtattaaggtacactttatggtaagatgtggagacatgtctttgtagattttgtgacagtaaagcagacctctgtgtgttgggtgcagtaggtgagtttttttcctagaaattggaagctctggatgtctcaaactccttctcaccacgtgcttcataccacgccagagaggaccttaggagccaggcaggtgacagggtgtggctgggtgtccctggcagcttgtgttctatggtttgagcctctgtccttgcctacttctctctccagcacagaatatgccatcaataagctgcggcaggaagggagtgaagaggggatgtacgtgctgaggtggagctgcaccgactttgacaacattcttatgactgtcacctgctttgaaaagtctgaggtcagtggggacatagatgtgggccaggggatgcagctacaaggtatctgttcactaccacccagcccaggaactgtgggagaaaggaacaccagggtctctctctgagcaagtctctggtagtctggaaagaatatcctacctgataggacactcaatagcacgactctgtattcttcctatgtctggtcctccctccctccctccttccttccctccctgtcgcccttcctccttttcttcctcctcttctttcctctcccctccttccttccctcttctccttttcttcctccttcccttctcttctcttttctctccggagaaggactgtaaccttagaaggtagaatgtgaccagaaaaccgccattccatcaggcacatgtgaactttagcttaattatctagagtgacttactctatagccagtggcagaatcatcaaacctagaactgtgtttgcctgtggcattctctggtgtaggctaatgtcaaagagccacctcgtcaacatggcctgtttcccccagcaacagctttgggcattttaacataaattgctttcccaaagtgtctgctgcataaacagccagatgcagctccaaacgattgctgattcatggtccctgcagtgccttttctattcacgcaacattttagaatgcttaaaaggttttagagaattttagaagatgtcgagggtgaggttttgtttgttgtggggttgggcttttcttggtgtgtttgtttgtttgtttgtttgttttgagacaggatttctctgtgtagctctggctgtcctggatctcataatgtagactaagttggccttgtgctcacagagatcagtggcctctgcctcttgagtgctaaggttgaaggaatgttccaccaggtccagtgagggtggtgagttttatgttagtctacattaaatctaccagcaatagtgagactcacccagactggaaaactgagttgaaagaacctgttgatggaggcaaagcatcagacacaggagacaagtgttaagagagccccgaggactgggctctgtcaaagtggaaggaggaagtcacataaggaacccagtgctgccagatgtactgggtaaagttccaggagtgttcctgaacagccagacctcagggctgccttgggcttggtggcttcctgttttcacttactggtcagtctttggaggaagtttattagtatgcatggctgtaaggtagccccgccttctgaggtagactcagagcaacatcctagtcagtcaggttgcctggggaaaggacagtcacaaagaggattgttgattgtacatgcagctaaagagaacttacagaggccatatgatagaggtggtgctgttccattgtctgggtttgtaggatgcattaaccttgtggacacggatgtcttaaatgtcatgtcccagtttttactataaagacatctttctggctctcactctttatattttttttctttgtataagaagagccatggaagaaagcttctcggacaggtttttgtggtgctggaattatggcctggatggacagccagctcccagctcccagctcccagctcccagtgtgtgtgcttctccttgggctggttcatagtgtgtgagggctcactctgaaagagttccgagtgaatttaaccttcacagttcttatttcatacatacactggttaatctttataaagtactaatggtttttttcttataaaaatatcatatattaattatacataataatgggtttattatattttcattcatgtgtgggtatatgtatgtatgtgtgtgtgtatatatatatatatatatatatatatatgtaatatgatccttattcaacccccatgatccttgcccactctaactcctgccagtctcttctcagaaagtccttcttccgttgtcatgtctttttttttttttttttttttttgatgaccaaatgattttaattaggattgctcataggaacacaagatccatcctagcagctataccactaaagacaatgtctcttcctcccccagcagctattaactgtattaacctcatcaggagggatggaagnnnnnnnnnnnnnnnnnnnnnnnnnnnnnnnnnnnnnnnnnnnnnnnnnnnnnnnnnnnnnnnnnnnnnnnnnnnnnnnnnnnnnnnnnnnnnnnnnnnnnnnnnnnnnnnnnnnnnnnnnnnnnnnnnnnnnnnnnnnnnnnnnnnnnnnnnnnnnnnnnnnnnnnnnnnnnnnnnnnnnnnnnnnnnnnnnnnnnnnnnnnnnnnnnnnnnnnnnnnnnnnnnnnnnnnnnnnnnnnnnnnnnnnnnnnnnnnnncattttttcacgaccttcatctcacaggtcaaaacgcagtatgacctttctgtagctgtaagctctccatatgtgacgtgctggcccctttttactttccgggtactatttcattattgacttactgcttggttggcttgttgatgaagtttattgggggatatttttagacatacagtttctacaccttcttgctcagtgacccctaatattacattgcctgatcccattgtaaacatggttgtttttgtggatggcaggtattgggtggccagaagcagttcaagaactttcagattgaggtacagaagggccgctacagcctgcatggctctatggaccactttcccagcctgcgagacctcatgaaccacctcaagaagcagatcctgcgcacggacaacataagctttgtgctgaaacgatgctgtcagcctaagcctcgaggtttgtctctgttagagccaagctgtgttcctctgggttgtcctttgccagttgtgatgctttacccatgtgggccaaaggatgctatctgagttcaagaaactgtagtcctaggtgtttttctctaagctctgtctcaggtctgtccccatgtcacatctcatctctagtgccagtgttgtctgtataacatacacctctcctcagtgccccagtgagactgcagaagagtctgctcaggattaataagcacagatttctttgttctttgagtaaagtggcttgacaactcagtttggtttatgtatgtttctggcacatctgagggctaaggaactgtgttataacagtgggaagtcccaggccctggtcactgagggtgtgtagatcactgagaccacctcagtagttgatgggtgatagataacataccctagggtgaaaagagagagaaacagtccaaatctctgagtcctgagcagatgttgagcgtagtgttgggttatgagagggaggtgccagtttggcaaaggcctgcccagtagagctgatgcaggaccagtgtggtaggccagggcaggagctgtagggagcttcaagaggaccactgtgaagtagagaaggacaggagaaatggaactgaggagaacagattggctgccataccaagggactgcagccttctcctgcagtcagagggctatagaaggagcaggaactaaaacccaggcaagggcccagggactcacctggttttggttaagctctgaaagaagcatggctaatgtccatgaggtagactccttgcctcagaatgtgagtgtgaaaggatgctttgggggttacctggccagaggcctcctctcacagaatgaaattagtctcatggaaagtacggtaacttggggtcaggtctcaccccagatactggatcctcatatattggagtttttgtttctgcaccccaacatgctgtcttgcctttgctggatctgtccttggaagtcttaagaccttgaagagaaggcagcacacaagctcttgacactagccttggagcaggccctttgagactatattgttctttaagggattacctttgagtaaggaacaggtagaaagggcttgggttttctagaagtactagtgattaaatccagggcctcatgcacataagtcaagtgtttacccaagtgtttctgctgagctacacttctagcccagggctttgagtttacaatgtgtgaattatattttagtctcagcaaaaggcaagttcctgaatttggtgaaagaggaaggttgtgttcttgttgatcagatagggttacctgccagcctcagagtaactgcagcctttgttttcatgctagccagtgtgccacaaagggcgaaaacacacctgcctcttggccatgaaacctcagagctccttagggctttaaagcccaatggtcttattttttacatgacctcccttctggtgttaaaagaagatctaacttccctagggatcatggtccccgggagaagacagcatccacggaattgagaaggccaggggctaggatgtgctttacttgaaggttgctgatacagacctctgatgtagctaccacctctaacagcagagactggaagccagtagctttggagggaagagtgggggaacagcgttgaatacttgggtggcttttcccgaggctcttctgaaacggagcactgagagtgccttctgtctacttttctcacttgctttagaactctgaaggtctgagttttcactcactgctctgtgattcatgggaagcctagaatgcacaccagatcttgtgcaggactgtcccattgggtgataatatttgagcagcttccactgtagcagtacctactactttcaaagtagtgtagtgactatcttattgtttattgttttttttttttccacataggaagttggtttcagggatattcagtgaattgctcaaggcttcacagctgatggcatcagcagtagtatagtagtgacagtgaataataacaatggctactgacatcttagtgagtgtttggtctgcctgtttgaaggccttccatgttgtagaccatttaattatcagaagaattcaggatgcttggccaagactccaagtgaacaaagattggagatttgaacaccctgtctgacctgaatacactgatatgtcctccccattccatcttcatatgctttgcataggaataggtactgtggtcagctatctctgggacacagggtatctcatctgaggggagggagagaaagctgaggagcccagtgtggatcgtcctcgtattagttctcagaacctgcaaattagagaagagctaaaatcaggaatgtgtaacacaaagagtgtcgttacaggttgctcaatttctctgcacttgtaactagggttcccagagccagatactctgatctaggttttacactgcagtatacatcgctttgtggaatagagaaaaggcagggaaaagccaggaagccagacagaagcatatgatagataagtaagcccttggtcaggcccagcactcaggcccacacaccactgaacatgtgtcagtacctattccctggggcctcctcaggatgggcaggtgtgatgctgatttccacttagttgctccttgtagaagatgtctgcattctgatgcacaaggctggaacgctctggtggaagactaaggtggtggttgatcatgacgacagtggctgccagtagtgaagcctttactgcatactaaagaaagctcttctgggcatggtctcatctgtttcacttagcaacctgaggagggcacagctttcttgaacgaaacatccttatgatggtgaaatggctccctctctcacaggtcaagtgtagtgcaggtccccacacagataaccaagcctgagccactctagactcatcctactctctgattcccagatggtcggccaccagcctctgtctgccctcgtgccaccagtcaaatagcctcattgtatttgactcctttccctcctcaagatggctgtacagagcctttttatttaaattgtattttcccaggctagcatcaaaagagaaccgtgcaaggaatgggctcagaaaaaaggagcacccagatgactgaagccagtttctggtacttagatttgtaccccaggaaagtcagactagagctgtgcctggatgctctgtgaagccttcctctctggcttagcaagctctgtggttaggttgctgagtctctttgagcctttgttctgatctagagtacagataaggatgttgacaattcctgtctcttgagcttaggcagaggagttaacagtttcttatagaactgtacccagcatagagaaaacagaacatatgaatgtaaacaaaaaaaagaccatatgaatgaaaacagaacaaaagaagatttgaggggcccttattgtactcatgtaaccagtgttgtaacctattgcttagcagtttatttacactagtctgtgtgtgggttctgtgaactgtgccttggaatttctacagagttttgggaactttcttatcagaatccaagaattagaactcccatgtgagaactcattgtcatcccgtgcaagaaagtggaacagggagatcatctgtgagttgtcacttccccagtggtactggtccagctaaaggaagtacacggtgtgttcagggactatgtcaggtctacctgattcccagaggattctgtactatgtctgaatttggaaggcagcttacaaaggataaattccttagatcctatgtaacccaggcctggcagacctggtcatgcattgtgtttgctgtttatcttagtaaagtttgggaaatggcctactcctaagccacatgtgaggttctagcttcattagcaagatttctaggatcctattctaagttgcttttccctttcatctgcatatagcttgtactttcctttttcacagagttccctagcctcaaggcatctgtgttcctcattcagttcacccctggtgcttcctacatttaacaaagtcttgttgggaactgggaaatagagtgcttgcctagcatgcacgagcctggtaacttgtcgagcattcgttatgttctaggctgtaggcatagagcagaacatgaaacagacatggtccccggcttcttgagactgacttttgtcatttgttttattattcttttggagacagcctaagctattctccaactcactgtttgctctcaggtgctgagattataggcatgtgccatcatacctgaccatttcccaaaggagccttccctcacctcagatcctgctgtgtgaaccctggctaaatcatagctctccatgtgctctctgactcctgttgactctgtcattagcctgtgagctcctggagggtatgaattaagcatttacccgatacagacttgttcatgatgtaactagcaaacccttgtgttgggtaagccccatggctcagcacacaatgctagccatgccagtgcagaatgctgcttaaaattctctgatcttttcacagaaatctccaatctgctcgtagccactaagaaagcccaggagtggcagcctgtctactccatgagccagctgagctttgatcggatccttaagaaagatattatacaagtaagtccccactaagggtctttgtccaactttggtcctgacaccccataggggagccccctagagatttaagtgtgtgtgtgggtaaagtctgctttggggatattctagtggaaagagaacaacgaggtaaggccacgcaagcccacctttcattttacccagtcttgctgttggccttcccctgagagactaatccttgatggacttggatgaggaggtgtggactacctggggtagaggaatgggatcactaacatgtcagtagaggttggtctcaatggagtctccaccccacagagtgctgtgtaatagtgctcagtcctgctttttcagaagggacttctgaaaggaatagagagaagaacaaagactacagggcagggcagaacaagagctggcttcagaaaggggacccttggggagctcagagcattgccccagccttcctgggatagcctttgctacccagaatattcagactaagccagacccacagaggcgcttacacatctgcgggtagttgccaccctcagtagcatgtgtggttatgtaaaatctagtcttggaagggcagaactcatttcctagggaaggacactaaagcagaggcccagaagatgagtcaccaaggctctgctcggacagagagaactgtgttgatggatgctgacgtggacattggtctttgtgggttctgttacctagcccttggaattaagtcttcttctagaggagagtaattgtcttaaaagcatatgccttttatggaacgttctgggaatgcagcttcccataatgctgatggatcacctcatgacagatgcagctctaatgaatagttgcaggactttgccagagtacagcagatagggaggataaatggccactctgctgtgacagataacaagtggtggtatttgtgtaaattaatatacccgattaacagtggtgtctctttctgtagggaacaggcttcctagatatcgaccacaatccattttctatgtttgcaagagcttccataagagctcctgtctacaagctttgtggggctaatgttagcagctcaatattattatgttttatgaatcacattttgattttcaaatattagaaattaaaaatgagaaatattgaaactcagttccggaagggtccttagaaacagatcgttctgtgcatgggcttatccgtctggtggtaccgtcaccttccttcacgtgaggaaaaacccagcgcagccctcagcttgggctgatgcagacatgattgatgcttttcaagtggcttgtgcatgtcctggtgatgggtgctgccaagtggtggggcagggagtgggggagtggagcatgtactgaaaggctctgaaacggaacacacaggctgagcagtcaagttcctgcacactgtgtgtctatagcagaagcctttatacctaagctccttactcgattcactacattgcgacgcaggtgtcattaggactccatttacagagactaggctaagatcaagcaccatgaaggaatgcatcttagttgaaggccaggaagcatcagagcgagaggatgaaggctcctttacttttcctccagcctgagagtagagatgccatctggcagagtactcccataagtctctctggagagctggctgttagatactgttcacaggtttgtgatagactgcagctgggctacaggggactattgagatggagaacaagctgcttttcaggagcagggttgcaactaggtcaaggaaatgtcagtgctgtgcatgcccaggagctttgtgtttttctaggcacctgatgaggactgtatgggatgccctggccccatcccactgtgttcagtatcccattgaaaactcagccctgacctgagccatcatgaaggcatggtggaagagacggctttctgcttccttcctcagggtgagcaccttggcagaggcacaagaacacatatctattctgggaccctgctggactacaaggatgaggaaggaattgctgaagagaagaagataaaagtgatcctcaaagtcctagaccccagccaccgggacatctctctggcaagtgtgctccttctctggagctgggggagtgagttggctggggaaacctctgtgctttttggccatgtattcccagccttgtctttcagagttcctcccttcagtgctgtcttagccagactggctgtgtgggagtagtgaggggagaatgatggtgaggagggagcagcctcctgtacctgtcctgtgcccttccctgctaccaaaagcccttgtgtaatgctgtgggtctctggaaaaagctgagtggtctcgcactctgagggggtttcccaggctcccacatagttggcaacacgaatgtccaaaggagtcaaatgacttgaccaggaattcttagacttttagagaggacaaacactaagtgtggagcaggaagtgtggctgcctgcttgttgtaacatagtagtaggccttgtatttcacagcatttagatgagagtaaggtggacctagtggctgtgggaacattgggagggagcttatcccaccagccttactcagcattgttggattttctaaataaatcccatgccttagttagagtcgcccagaggtcgaggcatgtccgtgacaccagacagccaggagaacagtattcaagtgtgggaggtgacagtggtgaggtagcttctgggattcactgaaggatggtcccttagcagttcaggtatgagcctacacatctctttgttcttttttcccacaggccttctttgaggctgctagcatgatgagacaggtttcccacaaacatatagtgtacctctacggcgtgtgtgtccgagatgtggaaagtaagtttgttcttcctttggcccttgctggggtgctgggtgggtactatgcagacgccttgggttttttgccttctgtttataggagaaatcggggtcatttgtggaggtcagtggtggctctggttcagtttccctctttaacatttcgctcttgccactctgggcccaagtgtgcagacgtgaggcagtctagagggctggaggaaggtgatgcgtgtgaacctgactgagctggggataacctgctgaagagactcctgccagctcacctgttctgaacctctgctctgaatccccatagggatgtccaggaaagagagagaggtttatattgttttaaaccccagctctttgatctccaaactctgtagtgctgactactcttgtgttcgttcacatgggagacatgtattggagggaagttctgtcctatgggcaggcttaacttcgtgctgcagtgtatggggctatctataatgtagcagtggtaaaggccagcgttctgaagctttgtgccaaggccttctatgccttgtttaacaaatcacccttgtcctaaggtccctgggagaggtaagtattgctgtttgcacataaacagatgcagtcttttaaggtgagagagaatttcctctagatagacagcaggttccagaggtggctgtttctgtgtctgcagatatcatggtggaagagtttgtggagggggggccgttggatctcttcatgcaccggaaaagtgatgcgcttactaccccctggaagttcaaggttgccaaacagctggccagtgccctgagttacttggtaagaatgtttttgtgtagatccccattaggacctagagtgttctcttggggctagggagagtgggcatgaaggggttgcaggtgaggggtattggtaagcaggtagaagggaacctgcttccctggtgccaggttccaggcagaaggaaagagttctgtgtgtgggtactgtagtgtaggctttcctatgactcttgcctagaggaaaatgatatcatgttggagactgactgtattatacagctccaggaggaggcgcaggactgctttagtttgctattctgaggataaaacacaaaaactaacttgaggaggaaaagtggtatttagcttacatatgtattattgagggaagccaaggcaggaattggaacacagaccacagaggaaagctgcttactggcttgtttccttggggctgcttggtgtttctaatacttggctggtggtggtgcacagtggcacagcaaccagcaattaggaagatgcccccacagacatgcccacaggccaacctggtggacgcaatccttagttgaggttctcacttccctgctgtgacagtcaagataagctattatttagtacactgaatgaatacaggaaaaacactgtgtccattagagctaacaatgtgggcacacataccatgggccagctgctgcaggttttacatagtctaatgtgcacagagtctgtgaggcatgctctgccattatctctgttttgctgaccaaggaatagagatatctcaagcagaattcatgggtggaccaggctgtggggtctgctgtggctggagtggagaaagctgacctgtggggccagggttgtgggcagaaacagagggtgtggacagagaagacaaggctgccttactacatagaccctttttattctacaggaagataaagacctggttcatggaaatgtgtgcactaaaaacctccttctggcccgtgagggcattgacagtgacattggcccgttcatcaagcttagtgaccctggcatcccagtctctgtgctgaccaggcaaggtatgtgtctggtccccagtttccatcccccttccatctccaccatctccttctccactaggcattgaccaccagcaacaagaagagctgtgctgtgctgtgctgggcctccctttagaaagggatccagcagacaggtgcacagttgctgctgctgtgccctgggtaggctgtagtacagagggagggtagaatccaacggcctagtcaacactttctagtccttgtggtaaaggggctgtgtcaatggtgctggcatagcacagcgtccattggagacatggtgaaatggtcgattggtgttgggcagaagccagatgtcctggatcttcccctgctgtcttctggagcctggctgtagccattgggcagtttggaagttagcacattacctttaatcaagagactgcagagattgtcacccttgcaggaggttaagttatgtcaagttatcagctcgagaaggagcagcagcccctggagccaagacctgaagctaatgcttcccaggctgcgctcagcctcagggacctggtctattaaagctgctgctaccttcagtgttgagtttagtaacttagcaatcatgtagtaagagagtagaaactgtgacagagaataagccctgaaatagccctaaatacccactatttagagggagagcaggagtcttttgttctttggagcctgatttgtgggtatcatgtagcaatcattcagtaatccttgagcagacacccctgtcaagggtcttgaccttggtgaatcattgatgattctagtgtaagcagagaggcctggaatccagtgatgcccacaatccagagtagatttgggggtgagacctagttcaggaaagttgtttgtgcttcatgaggctgttgtaggcctctgaggtagctatggcagggcactggtgcatagctgtgcaggacaggttaagaggtttgggaaggttaagtgggcttgagtccgatgctaggctcatgagccacactgctgatcgctttccttgataactaggaggttgctctgtggaggtaactgcattactcaaagacatttccaggggacatggcagaagcttctttgagattgctggctctgaccttggttagaagaagccagaaactgaagcctgagagattatcaggagaaagagatatgtggctgctttttaaattttaactttaaatatgttcttctgtcctcttgaaaagaaggaatacacttaaagttaacattaacagtgtggaacatagaataggatgtgtgtaggtagccgcctgcctctgcacgctggacttcctccccactcgtccctttttctttccctggcctttgttcagacacttgctcttccgtgctttctctgtctatggcgttctgctgtttttgacaccaggttttaaaagatggctcctctggggtagctcgtggggtagcctttgtgctggccttgatcagaccacctaggttgctgtgtgttggactcaccataggacttccgtggccaggaattatgcaggctgcaggcccacccttgtagctgcagaggcagtattttgcatattaggtggtcccaggagctggcctataggtgggtctgttgtctttccccagagtgcatagagcgaatcccctggatcgctcctgagtgtgttgaagactccaagaacctgagtgtggctgctgacaagtggagctttggaaccacgctctgggaaatctgctacaacggagagattcctctcaaagacaagaccctcattgaggtgagcacttgtttccagactgaggtggacaagatctcagatgctcatgggcctgtgagcttggtcgtcttacacttgtaagtaaccttcagcctcggctccataaaacgggaataaataatgactcctctgtcgagtccttaggaaggtagacaggcattgcacagctgcagtataaaaacgaggctttaaatgagtggagctcctggtgtgtactgactgccctagacaggactgaggcttgggccttcccctgaggactgctaaggcttgcagagggttaagctcagaaatgaaagatataaatattttttaaacggtcataactgtgccattcctgactgactgctatgactttggcctggtgaacatgtagtttttaatttactgttgtgtgagcacttcctcgtgggaacttagtgagttaattggcgcgtccagcgctgacttccttccgtagctcacttactgtggtatttacagtttgctctgtctttgtagggtaagcatggctcgtgtggtttgtttctgagcagtgtggtaattggaattagtgggtgagtgaggaggatcaggaaggctgctgctcgttgccacacaattccagagaagctgccgggcttccctagaacacagcaccttgggagtgggaggtgctaccgtttctccttgaatctgggatatgtcactatcacgactgctttcctcatactggaaagaggccactgaaaccccacattgaggacatttgccttttggcagagacactggggattgaagtagggattggcagttgtttctgaaggtgtagagtcgaaggtctgagggtgggtacctggtctcccaatcgtcattcttttttacagaaagagaggttttatgaaagccgctgcaggcctgtgactccatcttgcaaggagctagctgacctcatgactcgctgcatgaactatgaccccaaccagagacccttcttccgagccatcatgagggacattaacaagctggaggagcagagtgagtctggccagccagtcccagcctcagagactgctggggcagggagggtggcagtcctggttactgcttggaggctaatctgtttccttgtctcttcacttagatccagacattgtttcagaaaagcagccaacaacagaggtggaccccactcactttgaaaagcggttcctgaagaggattcgtgacttgggagaggcaagttacacttgggctctagcctctgtctgcatggacagctgccatattcccctttgtccttcgtcagaggctttaagagaagcaccttaatgccctttgtcaagggacacttgaccatgccaagttaggtgtacctgcatgtgaatgactgcataaatacccaggacctgggacagcttcctcaagtaccttgacttttctctgtgctgtagaggagggccaagcatagatgtagactaaacgggagcatctctaactctgactcttccaagattatactgtgattccttacataaggagagtgccaagatatgagtcacgggttttcctttgagtagcagctggtgtgaccacgggagttcctgggttggtgttttcatatagatagactctcagacgctcacttaacatcatgactgtactggactaacagcatctgtactgggcattttcacactcgtccgtcatcctcctactgataagtggcatatttgggatttgaagctcccctgtgcaaatgctcttttgagccctgctagcctgtcctatagcatggacctgtgactatgaaagaatgcctcagctgtcctccgaatgcagaggtggcctcattgctggagagtacactgtcttagaaactgggattgatgggtaaagtggtcccttagtcaccagctgctttcttagtcttcgctcagtagcagaggtcattgagtcaagtgaggatgagctgagccgagaggagtcaggagatcagaccgaggtgatgcttgtggccgtgagagacagcctgagaacaaggcatttcctcagcggatctagcttgtctgggcatctctgatagcatggacatattccttccagggtcactttgggaaggttgagctctgcagatatgatcctgagggagacaacacaggggagcaggtagctgtcaagtccctgaagcctgagagtggaggtaaccacatagctgatctgaagaaggagatagagatcttacggaacctctaccatgagaacattgtgaagtacaaaggaatctgcatggaagacggtatgttgtgcacactggactgtgggataaaggtccagtggctctctgggtcctaagggcatttgctggtaggcagtccgcagcttcatctttaccagctcctgtgggctgtcagacattcaggtctcacaacaacaaggtccttaccaactgcaggcctcctgggaggcttctcccagccgcaggatgtgaactttgtctttcagattcacgtataatgctgggaagcatcccagatagccacacttgtgccataaggaagttaaactactcacccccattcctcttctgatctagtgctacctaaggccttctgctctgtccttattgaagctaaggtagcaaatagtacttagtagtcacatttactaatactgtaccttatctgcaaggcagtcatgcatgtgctttaaaactagtaataagagggtatggactatgattttaaaactgatcgcttgtctagagattcacaaagcactaggactgcagtaccctgatgaggcaggacctggggctatggactcctgtttatcactgaagtgtctgtgcctgtggtaggctcttcttccccatgcttcgggggctaggctgaccttccacccccaggccctgtctacagagccccatgctcatcctctctgcagcctcatctgatgctactttctcctaaataggaggcaatggtatcaagctcatcatggagtttctgccttcgggaagcctaaaggagtatctgccaaagaataagaacaaaatcaacctcaaacagcagctaaaatatgccatccagatttgtaaggtaaaaacaccaaacagaaagaaacagcctgttttttttaaaaaagtaggcattctgtcctggggaaatggttagtaattagacctcagcgggagcctgtaataaatgaaccgtgtttttaactctgcaccatttgcatgaaatgtgagcagtggactttacttggaccttttttttttttttaattgtttaattttataacaaaaactgttagtgatatggggatgaaatggctttttttcctaattgtgctgtggaagataaaaaaaacacaacctgaagtgactttttcagtgggtctgacctactgctcttaggggaaggactgtgggttatcaacagcacatttaccttcgcaatgggcctgagccacacttttctcttaggggatggactacttgggttctcggcaatacgttcaccgggacttagcagcaagaaatgtccttgttgagagtgagcatcaagtgaagatcggagactttggtttaaccaaagcaattgaaaccgataaggagtactacacagtcaaggacgaccgggacagcccagtgttctggtatgtaaaccagctcggccgtgctttgtagcttagcattgtcttgaaggctcttgaagctgtgcttgggtgcgtatcagctgctctgagcttttggagaatgggagagtctggccatcatcacttcagcctctgtagcttcatgtgagcaagccacacccaccacagttctcatagctgtgagcaggtggaagaggctggctcgttcttaatacatccgtgtagaagccctggagggatcgcagggccacaggtacacattgccatagtcgtggagatcctgcaagagggatagatacttggctaggttttaggaaccactagttaccgtagttagcgagccacgccctgaccatcattgtctctcagttgggaacaccttcctggggaaagctgcctgtgtaccctgatgcctctcatgcagacatggggccctctccaccagcaaagcctatccagagtcttccttcctcgtttaaaaacggagtggttttgaggcccttgattgtgccagtgaatcctgaattatgggtgaggcagccaacttagtgtggcagtggcacaggcttcaggcatgggtttgaaaggctgtgtgtgattgggtaaaagctgaagggaagggggcatggctggagctctgctgttctgctgacagagataagagggaactgaaagcacgtgtgtcattgggaagtgctgtaggggtggctgagtcagagcatcaggacttgaccagagttgaaggacacaaagtctgtactgaaggtcaccatggagaggaacaagaaaggaacaagggaatcggggtcagctgcttcagtagcccaggaaggacaggttgggacagtaggaagtggatttgtctgaggagtgttcaggaaaccagttctgggatgcctagacacctggtatgggcatttgggcatcactcaccaaaatagtgatgccagagagggtgctgactcctggcttacagggatataacttggggctcatcttcaggggactgtcccctctctaaaagaatgttccctgggacacgaggaacacagatatctcgtttaagggcaagtaagatgttgctgtgagcctctggactgctgtcccgtgtgctgtgtgcactgtggcagcatgaatggccagagtccctcagaggcacgtgacttacattctcaagaacagggaagtggctttcctgaggcactctttttttttttttttgggaggaacaaaaggctcactccctgctttcctttcaggtacgctccggaatgtttaatccagtgtaaattttatatcgcctctgatgtctggtcttttggagtgacactgcacgagctgctcacttactgtgactcagattttagtcccatggccgtaagtgttaactgctacctcttgtcagtgtgccacatggagagggttacagcatgctatctcacatggtctggcaaagtttgccttcacaagtgcagaattcagtaagacgactcaggtttttagggtgagggtcatcacaagagagaatgatacactttgagcattgccgtaggggttttgttttcatacgactgacagctgtggttggtcccctcagatgtgctgttatggaccaatccttgagagcgcaaataagggttttagattttcatttgaagttatggaagagaaaagctttgttgctttaatttcttcttacttctgaaagcatcaccttaattttgtttggttttattttacatagttgttcctgaaaatgataggcccaactcatggccagatgacagtgacacggcttgtgaatactctgaaagaaggaaagcgtctgccatgtccacccaactgtcctgatgaggtagctgtgtccccttcatgggaagggaactgcattttgaatgtctttacagcttgccttatccagcatgggaggggaataacagaaccgaaggccttacactggctacagtgttggctcttgcttaagagtactcgctattctttctgaggtcctaggttccatttacagcatccacttgggtaagacatgagagaaatccctcctgcgggggatgatatgctgctcaagcaaggctcctctcagggagctgtggcctccataccgtgcatgtctgccttcccagaagagcacatgtgatgaggtcttaccattgcctgaagacatttaccccactcactagcattttcagttttctagattctaaactggatcaagcctccatagatactcaggactgtctggtcagaggcaggtgcagtggtggtgaagggggtaggcagattagtaactttcctgcccctctcacagggtcacaatagtgacctggattttgttgaaaatcagttaacctgtgagttaaacaaatgataataccatttatgaactattattttctgcattttaagttgctcaaatactcagttgtttagtcttgttaaaggacagcagtttctagcgtattcttgataattttgtgtttttgaatgtgtggatgcttatggatgccagagactgagggatgtgtctgcttggttgccccggctttgtttgctgaggcagggtctccctggagttagtccctctggctttgcgaggctggccagtctgccttacagctgctacccacgcctcgcctttaaactgtgtgtcatgctctgaactttaagttacactcgtggggcaagtacgtgatccaccaagccaactttccagcctcttattgttcttttagaatctctcaaatctgatattattcatactgttcttgcttttatttttcataggtttatcagcttatgagaaaatgctgggaattccaaccatctaaccggacaacttttcagaaccttattgaaggatttgaagcacttttaaaataagaagcatgaacaacatttaaattcccatttatcaaatccttctctcccaagccatttaaaaacgttttttaagtgaaaagtttgtattctgcctctaaagttcctcaacaaatactcgagttacacatatgcatatgtcacactgtcactcagtgtgtggatatgcctatgtcacactgtcactcagtgtgtggaactttctctttaaaggtgtaacatcttaaatttggtgatgaatagtgacaaccaaaagactagattgtgcctaagcactccttctggaacaaccgaatgatcagctgcatagcaaaggactgtgccgctggcatattgatctcagataaaaacttgtggacttggctgacactctcccttgccctgaaatctcaatgtctattcagtgatagtacaagcacgtagataccacttagtatactattgtttctattaaaaaaaaaaaaaaaaaggtctgttcctgctaccttttaggactgaagttttaagcactggtacccactgtggggcaaacctgtgctgcaggagggagcctggcatacacactctgcatgttacttcttgagaactagacctgtgtgcctgtgttttcctgaacagctgctttctgtcaggcagactcctctgacctggatgcggtcacatccacctttaagattgtcagtgcatactccttcctgacgatcccctggggcaagctgccgacagtggcgtaaacaggagacatcaccctatactgcgaaactacagaaaggaagacagcttggcccagcgggctgaagttcagaattcactaggtagttgttgttggttgacttggaggtagctgggtaatcaacagctttcactttagattcaatgtgaaccgcagagttactcatgaccaagagtctggcaaactcattaatgctgtttaatacttgtttgatattttttcaccttttgagcccttttcccaaagaattcaatatcagtttagtagcaacagtacagttgccatttaaattggtttagttgctgtatatcaccatagcccctgtttacgtcaaacctgtgtctcgctctatatgcactttgtttactctttatacaataaacatactaaagacttcacatgcatatgccttttaatattaagcttgcatcttgaaaagcatttcaaaccattagctgacacagaaaactaacagcgtagactttggggggttggttgtaatgaccttgtactaacatcacttgatttgcatttctgtcttgtaataacgggcacaggctggcatagtggaggacccacatggaatgtgaagtgtctctaagttccctccactgcttcctcctcacactgcagctcccagatagcagtctctagcctccactattctgtgacttagagctgcagccagaggcaggaggtgcagggtcagagcacaccattagtcatctgctgggacctcgtgctggtcatcacctataggaagcgtgtctaggacggtcttcctttcattttttagctgtcattttttcaatgaaagctggtatatgcaataaattaggccaggtaaaattcattataaaacatgtaacatatgtaccagttttagattttataattaatgctggagagcattatcagtcaaaaatgataagtcctccaaataaggttttttaatgatctgatctaggatcattgagatcctacacttcatcagttgtagtctcttaacaatgaacacatagaaatttctagatggaaaaaggttgctcacttaataccaagatcttcggcaaagggtgaagtcaaaagtcagacaaataaagacaagtgttctttcagaagtgaattggattaagcggccatttcctttcagcttaacaactaccaaagagtgagtaaataaccagagtgaggtagagcctgttagctcagaactgccccacgctgtccacggcctccctcaggaagggctgtgtgcactgctctgctggggctcggccctgtctagggacgagaccttcactgctgtatgctatgagacggcagggaaaccctggctccttgctatgcacatctcccataagataaaaagaatagggagacagactaagggcaagagagtaaacgcccctgccattgcaggctctgtggttctcgaggctactcagttcccattgtgacacaaaagtaactacataatatgtaaatgagcaagcctcactgtgttcccaacatcatcttggggacattgaaactgcagtttcatgttgtaagtcctcccctacccccagacgtttagaaatgtcctcacttgattcacaggcagcacaaagctaggtggtggactacatgtggccctagtgtgtattctgctaacccttgtattatgtacaaaagttacttttcctgaaatactttgttttccgcaaaaggtgtatatggtaaatgatactccggaagtgaagcatctgaagtcacatcactttcactctgccactgggttggtcttatgtggctttgtagagctaatggaggctgcatgatgagcatctgttgtcaccactgggtggtactgccacccttgcagtttgaggaaagactacagatgagactatttttaggggagagtaaggtaaatgcacattggcttatacgaaattcattctaaggctaaggaaacaacagtttcccagttattgcttcagactttatatatgatgtcaaaattgttcccaggcccgaaacaaggactattggaatgctgactctcctgtgagcggagtccttatcacgtggattaagacacatctaatgctagtggaaatgccctcgaccagtggtgtttcttattgctaggtgggtatttggctgatctgcctgctgcatgacagttccttctgggaagtcagacacccgtatagaaaggatatggctagtgtgaatgaagttaaggcagcgatgagcagcaggcgccgcgccgcagcaggcgggcaggagacccggagcttagtacacacgcttctttttcaagtaggtttctgtgtagctcactccggtgtcctgagggtgctggccagcgagttctaccgggcctccttctggggcagagatgagataggaggagcctcgcttctcattcctcaaggaggatgcctgtgagaaagtcagtgaagatgtccgtgagaaaagcatgctatcctcagttggtgtgaggacagaatcccagaatcccaaaaccgagaagaaatagaaaaccacctttgttgcaggaattagactttcaagtctctataaagtcacccgtggagagcctggtatggttcagttgaagagcagcctctggccctgcactccaccccagcaccagtcagtcccacctagaacctgagccctcacctcagttctgggatgtgggaggaggaaactggtcctattcacacctgaggcagaagagcagtaccaagcatctggctctgatggaggatgcaggctagcaagtggggagtcgtgttaagtatgcccattgactgtgtgcaagaacttgtcagagtggtgtcagggaaaatgacagcactaccaacagtaatggtcatctcaaaactttggggccccaaataatcagatttccaggctcccttcccgagagtctgatctaatgttccccataacaggccacattaatcagtacaatgatatcctgcagcctagcacgtgacctttccctacaaataagtgtgaggtgcttgctgaggccattataacagcccagatacacaatgtgagaacagctgatggggagggaggtcagctttctaacactggagagttctcacattcggtgtctttaaacccttaaaaaggttgcgtcataggttgcatttgtcctcccatcatcctgtcaagaagagacatgagagcccatgggttgctcagtggcatagccattgcattgggtttcatttggagagagaaaaaaaaaaaaagaggcagaatgacagacccaccactaaacagctacgctgcctctctccctcaatcctcttaagtgagtccaaggcagtggtcctcagcctgggtcagatatcctgtatatcagatatttatattacagttcatatcagtagcaaaatcataggaagtagtaacaaagttttatggtcgcgggtcgccagaacctgaggaactgtattaggaagtcacagcaataggaagggtgagaagcatcgccctaagggattattcacaaagttgaacaactgcatagcatttgcttggaaactgtggaggtgggggcagggaggaacacagatgaaagtagtcttaggttgacaatgtaggcagcttttccccggctcacgcccactgctgagcccagcatctcccagcaattggaaagatactggtggctccaccttagccactaaaaccgctaacctgcagctcgttctgcaagtgagattttcccaaacatgaggggtggcttagggtttacttctgtggacagacaccatgaccaaggtggctcttataaaggacagcattgagttggggctggcttaataggttcagagcttcagtccattagcatcaaggtacatggcagcctccaggcagacctgggacttctggagttgagagttctacgtcttcatccaaggcagacaggagaagactgtcccctacgtggctaggagggactcaatgcccacctcacagtaacacacttcctccagcaaggccactcctcctagtagtgccactcccttggccaagcatattcaaactgccacaaggagcaagatgcaaacacctctcacagtgggcagagctcccctatgcctccctctctccgtgctgcatggtgaccacgttcatccttaaagcaagagccttctagatcgtctttattctcccaaaccaggcagacactggatgttgttattcaaatggctctatatcatccagagccagccaacagagaccgaagaggtgagcctgaatgtcagagaaaaacattagttaagaatgagaaatgaaaaatgcccttgtggctcatacagcagcggagaaggataattctgacttagtacatcaaagacggctagctttgtaaggattagtgagtggggaacaacggtagttggaggttttgaagcaagcacagtagtctgagaaaaacaaactcgtaactaaaaatgagtaagaaacatttaaaaattgccacaaagagaaaaaaagcacacagatcaacttcctcttgtctgtcacagcatgcggcgtctcttccttcatacccttcaccttcaggtcttgggccctaggcttcaatgaatgaatgaatgaatgaatgaatgaatgaatgaaaacgtgcacttggctctctccaaactcctatctgagggctttcctcagttactggagaggagtcggtaggaaaggcacttggcaacaagagtcatgtcctgggctctacctctgggggccacacagtcctctgacctccacaagcaggccatgacgtgtgcccttccatccctgtgcacaaaataagcattttaaaaaatttcaaatgcacttgaaacaaagctcaccctagccctgtgatgctacccagctgcagctttgggagccagtagctcgccctgcagatgcagcacacccaggtactttctgcaccgtagcacatttaaagttcaaaacgctgtcccaggacagcagggaatttagaatgtaacatgctactagcagagtgtggtggcagataccttcaagtcccagcactgttaaggatcccagcttttagaaggcagaggcagagggatgtctgaatttatggccagccaaggtacacggtaagatcatgtctcaacaaaacaaaacaatttaaaagttgtgggctggagagatggtttcatggtaagaaaacacttgctgctcttgcagaggaccaggttcaggttccagcaaccacactagggagctcatcaccttctcaatgtccagattcaagagttagactccctctgctgggctccatagtcacctgcagccatgcagtataaacactgacaagcagtctctctctgtgtgtctctgtctctctctcacagacagacagacagacacacacacacacacacacacacacaaagtataacctgctgatttggtgaaattgcaccagcacaagaacatcccgtcaggttgctttcacaacacttcactaggcctcatccaagagccgtcgctcccccgccccccaggatgggccctttccagaaaacattcatcttcagcaggattctcctcaggatgaggtgaaaccgcctatcatgattcttcctgggctctgatctttggaaccacgatgtgaggaggcggcttcctgagtgctgtagttatgatgtcaacaatttccactcccctctagcctcccgcgggggagcccggcatcttcactcttagctagtcagctatctcaccaagaagatgagaaatccagagagttgacaatgactactggactcctggccctcaacccttggcatctcaacctcccacataatttgtgacaacattctccctgacatccagattcctgagatagatggccaatcagcaatgaacatcatacgggaccagccaggcaaactaaatctcctcccagccccccaaaacccattctacccgcgttcctacccatctcagccagtgacaattccatttttccaggtcctaaacctatgttctggccttcctatgttctttagtcatagcttagaataaaatcctaagtacacaaaggacctaacaaggtcctacctgtctgccctgtccccacccactgagacttctccatttccatcttgccccagcctctcctgctgggcgctctccctccctttgttcctttaacaaggtaccaagtttgtctcatgcatctctgcactggctgttcctacttgtgggactgtatgacaccgacaactgtgtatctataagactcacatttgcccccaaaactcacctggcaagtcactgtgtcacatttttcaaaaatgaaaaccacccggaaagtctcagtggccacaactgtgtaagttagacaccttaagttcatttaatggtacaaaggaatgtcctgtgtcacataacatgatgtgctcttgcactgtttgcccactagatggcagcattaggctctctaaggagagaccgagacgcttcattgctttttagttcatttttgggtttgcggccaccctaactcatcacacattctgtagccgattccctgggttggacggccagcttcccagcaggaaagatccatgtaaccagggaaacacaagactatggcttggcagtgcaaaggactcctgccagtgagccaggcggctgccccaagccaagtgtggaaagaaaaacccaaatctcagtttaatggtcagggaaaacggtgaagggattcctaaattatccttcatattactgaaactaatgattacgccatgctgaaaaggtactttttctacttcaataaaagggggcaggaaggaatattctattgttttgtcagattgtagttagaggctatactcgggcattaaatatttaataagctggctcatgggctcctgtaacatggacgtataacacccatctgatgcagacagacctgttcatctttacctcagactctgaaatatcaaactgtctatagctatccaaattaaaaagatctttcagctaataatgctattagactttaaaataactccatttgtttctggcttcatttttcatcgtccacttcaaatatctaggacatgtaattttgggaaaaatcagctgcatctcagtgttgagtacagtaactatagccagggatgtggggaggtaactacttaaaatcagctgcatctcagtgttgagtacagtaactatagccagggacgtggggaggtagctacttaaaatcagttgcatctcagtgttgagtaactacagccagggacgaggggaggtagccacttaaaactggcttctaaggagctctagattggaacacgccgggttaacgtggttacggtacgcactttggaacttcaggaacactaagtaaatatgcttcctctatttaggataactaaggtttgtttctaaactaccacactccagggctggcaggatggctcaacagttaaaagcgtgtatactgctcttacagagaatgtaaggtccgctcctagccccacactggtcggctccaagagaatctggttcaccctccctgcctctgcaggcacctgcttacatgcacatactctgacacaaacacatatgcatataagtaacaagtaaacactgaacatatcgttagtccagtgtttgtttctatgtacagagctggaagactcagtctgaccccagagtatccccgcactgccagtgacagccgctgactctccgtctgaccccagagtatccccgcactgccagcgacagccgctgactcttcctctgcactcccagagcagtcatctgactttccctacagatttacttattctgaacactgcacataaacagaatcatacatgtggcctctttggcttacttcacttagcatgcttttgtggttcatcatgctgctcatttgcttgctaacttgtagacaactgggcctttccattttggctgttagagataatttaccgtaaacattagtgtataaactggtatgtagatacattcaaattctcttagcacatatctacaagtcaaactcttagtttgaggaatgctaacttttactgacagttcaccatgcctttgcccatatagctgtgactctttttccttccagtttcttggtgtgggtcatctcatatgacctacattccatgcttgtcactcttatccctgctgacatctgctgcagtcccttaatgaagtttttattatgttgacagcctgcttggtgtggcccagctcccacactgcccaaggtcgttctttacatatgactcactttaattctttataccgtcgtctcctaagtccaacacccaggagaccttatgagcattttgtattacctgcttcccctgtgcacggtgtcttagtcaatgttctattgttgacatcatgaccatgggaacttttataaaggaaaacatttaactggggctggcttacagtgtcagaggtttagttccttgtcatcatggcaggaagcatggcagagacggtgctgaggaacaacatggcagagatggtgccgagagatctacatctggcttggcaggcagcaggaagagagacaagaggcctgtcttcaacaattgaaacccaaagccacacctactccaaaagaccacacctcctaatcattgtcaagtactgccactccctaatgaccacgcattcaaatctatgagtcgatgagggtcactgctattcaaaccaccacatttcctgacttgtctgattcctctctctctctctctccctctctctctctctctctctctctctctctttctgttctattgatttttctgttgttgttgaaaactgaagatcatttaaatgaaatgatgtggtgactggaaatgaatctacaaacccctctcttttgttactgttcagtagcttcttttgaacttgtgaaaagtcagttctcctggctgtgtgaactgctgttatctgttaatggctaccctatagattgcgatgcacattcatgcacaatgcagaaaccttcaaatccctatttcacttgctccattctggccctggcattagggctgtaagataactatctgcatgcattacagtgtcaacgatgctctgtactggttccctatgaactcaaaggggggaaacagttgtcatctgcacattttatcagtcctgacagtggctctcgctgctggagaggctgctagacaccatgtgatgtccagggaaggcccagcaattattcaaccccagatgacactggtgccaaggctgcagtctctgagacaatacgcattgttgttaccccgttactgtctagatcatctctctgtaagtctgactcctgtacacgatcgtgagttcctgatttacgagaggggactctgctcatgagatctgtgttttttgaagaaaattttgatcgttcgtttttcaaacattttatactccattaaccgcatctcctccactgatatgcacttctagctgcttggtctgctcccggggctctgaagagcctgctcactggtttccactctctcctctgcctgctgcttttctagtggtgaatctttccttcctgtctttccagtcctgtgctgttcccatctaatgtaatctttaatatcacaaaacaactgctaggcagtggcgaatgcctttacttccagcactcaagaggcagagcgaggcaggtctgaatttgaagccaccctggtctacagagtgagttccaagacagccagggctacacagagaaaccctgtcttgaacaaaccaacaaaccaatcaaaaagagagagagcgagagcgctaaacaactcctgtcagttctagaattattaaattcttttatagtgtgtaactctctgagaccccctatgtgtccatgatgtcatcatgttatttgccatttatgttttaatgtcattgtttactgataccaacacctggtcattgcggctccatctccctcatgaaatgttttatatctgtaggttattttacctacatgtatgtctgtgcaccacatgtgtgcctggagcccatggaggccagaaaagggccccaggcactggagttaacagacggttatgagagctgccatgtgggttctgagaatcaaacccaggtctgctggaagagcagccaatacccttaactgctgagccaacccttcacccccaacttcatagttaattgtgaattactggatgctgagaacgagaaatggaaaaagtacggactccattatcttcctctgttgaggacagtttgttctaactcagtggttcttagccatcccaatgctgcaaccctttagtgcagttcctcatgttgtgctgacctcaaccgtcaatttttttttgtgtgtgtagctaattcataagtgtaattttgctactggtaatataaacatctatgttttctggtggtcttagggaacccctatgaaagggttgtctgttgcccaaagggcttgtgacccacaggttgagaaagttcaaaatccaagtgtcgcctctgcgctggacttcaccgaccatcaagctttggctctgacatctccctgacagcagcggttcagtgctcagccaactaggttaggctggagtttcacgatggctccggggctcctacccatgtgcttccctctgttccaggactttacagcttcacagcccttaggcttcctctgtgactcaggtcaccagaagtgcagatttgcattgagtcaagcaaagagcctcagaaacatgactgtcccccaggggaattccccttgtcaggacctgacacccttcagcgtttgctgaagtattccccaacgctttcaaacagcagctgcttttttcaaatgcactccagattttatcagggatttaataacaataacttcatattcattagaaacaccaagtagcaaacccttaaatggataactttacttcaaagtgaaatcatgccatctactatctgacacaaccgtctgtcacaatccttatgcccaagaacctaaacagagtttccaggagctactactgc

SEQ ID NO: 863 - DNA, 4585 bp, Mus musculus
agatcagctctgaatgggctttggaagtatctaaatataaaagaggactgcaatgccatggcgttctgtgctaaaatgaggagcttcaagaagactgaggtgaagcaggtggtccctgagcctggagtggaggtgactttctatctgttggacagggagcccctccgcctgggcagcggagagtatacagccgaggagctgtgcatcagggccgcccaggagtgcagtatctctcctctctgtcacaacctcttcgccctgtacgatgagagcaccaagctctggtacgctccgaaccgaatcatcactgtggatgacaaaacgtctctccggctccactaccgcatgaggttctactttaccaactggcacggaaccaatgacaacgaacagtctgtatggcgacattctccaaagaagcagaaaaacggctatgagaagaaaagggttccagaagcaaccccactccttgatgccagttcactggagtatctgtttgcacagggacagtatgatttgatcaaatgcctggctcccattcgggaccccaagacggagcaagacggacatgatattgaaaatgagtgcctgggcatggcggtcctggccatctcccactatgccatgatgaagaagatgcagttgccggaacttcccaaagacatcagctacaagcgatatattccagaaacattgaataaatccatcagacagaggaaccttcttaccaggatgcgaataaataatgttttcaaggatttcttgaaggaatttaacaacaagaccatctgtgacagcagtgtgtctacacatgacctgaaggtgaaatacctggctaccttggaaactttgacaaaacattatggagctgaaatatttgagacttctatgctactgatttcatcagaaaatgaattgagtcgatgccattcgaatgacagtggcaatgttctctatgaggtcatggtgactggaaatctcgggatccagtggcggcagaaaccaaatgttgttcctgttgaaaaggaaaaaaataaactgaagcggaaaaaactggaatataataaacacaagaaggatgatgagagaaacaaactccgggaagagtggaacaatttttcctatttccctgaaatcacccacattgtaataaaggagtctgtggtcagcattaacaaacaggacaacaaaaacatggaactcaagctctcttctcgagaggaagccttgtcctttgtgtccctggtggatggctacttccggctcactgcagatgcccaccattacctctgtactgatgtggctcccccactgattgtccacaatatacagaacggctgccacggtccaatctgcacagaatatgccatcaataagctgcggcaggaagggagtgaagaggggatgtacgtgctgaggtggagctgcaccgactttgacaacattcttatgactgtcacctgctttgaaaagtctgaggtattgggtggccagaagcagttcaagaactttcagattgaggtacagaagggccgctacagcctgcatggctctatggaccactttcccagcctgcgagacctcatgaaccacctcaagaagcagatcctgcgcacggacaacataagctttgtgctgaaacgatgctgtcagcctaagcctcgagaaatctccaatctgctcgtagccactaagaaagcccaggagtggcagcctgtctactccatgagccagctgagctttgatcggatccttaagaaagatattatacaagccttctttgaggctgctagcatgatgagacaggtttcccacaaacatatagtgtacctctacggcgtgtgtgtccgagatgtggaaaatatcatggtggaagagtttgtggagggggggccgttggatctcttcatgcaccggaaaagtgatgcgcttactaccccctggaagttcaaggttgccaaacagctggccagtgccctgagttacttggaagataaagacctggttcatggaaatgtgtgcactaaaaacctccttctggcccgtgagggcattgacagtgacattggcccgttcatcaagcttagtgaccctggcatcccagtctctgtgctgaccaggcaagagtgcatagagcgaatcccctggatcgctcctgagtgtgttgaagactccaagaacctgagtgtggctgctgacaagtggagctttggaaccacgctctgggaaatctgctacaacggagagattcctctcaaagacaagaccctcattgaggtgagcacttgtttccagactgaggtggacaagatctcagatgctcatgggcctaaagagaggttttatgaaagccgctgcaggcctgtgactccatcttgcaaggagctagctgacctcatgactcgctgcatgaactatgaccccaaccagagacccttcttccgagccatcatgagggacattaacaagctggaggagcagaatccagacattgtttcagaaaagcagccaacaacagaggtggaccccactcactttgaaaagcggttcctgaagaggattcgtgacttgggagaggcaacatggacatattccttccagggtcactttgggaaggttgagctctgcagatatgatcctgagggagacaacacaggggagcaggtagctgtcaagtccctgaagcctgagagtggaggtaaccacatagctgatctgaagaaggagatagagatcttacggaacctctaccatgagaacattgtgaagtacaaaggaatctgcatggaagacggaggcaatggtatcaagctcatcatggagtttctgccttcgggaagcctaaaggagtatctgccaaagaataagaacaaaatcaacctcaaacagcagctaaaatatgccatccagatttgtaaggggatggactacttgggttctcggcaatacgttcaccgggacttagcagcaagaaatgtccttgttgagagtgagcatcaagtgaagatcggagactttggtttaaccaaagcaattgaaaccgataaggagtactacacagtcaaggacgaccgggacagcccagtgttctggtacgctccggaatgtttaatccagtgtaaattttatatcgcctctgatgtctggtcttttggagtgacactgcacgagctgctcacttactgtgactcagattttagtcccatggccttgttcctgaaaatgataggcccaactcatggccagatgacagtgacacggcttgtgaatactctgaaagaaggaaagcgtctgccatgtccacccaactgtcctgatgaggtagctgtgtccccttcatgggaagggaactgcattttgaatgtctttacagcttgccttatccagcatgggagggctgctttctgtcaggcagactcctctgacctggatgcggtcacatccacctttaagattgtcagtgcatactccttcctgacgatcccctggggcaagctgccgacagtggcgtaaacaggagacatcaccctatactgcgaaactacagaaaggaagacagcttggcccagcgggctgaagttcagaattcactaggtagttgttgttggttgacttggaggtagctgggtaatcaacagctttcactttagattcaatgtgaaccgcagagttactcatgaccaagagtctggcaaactcattaatgctgtttaatacttgtttgatattttttcaccttttgagcccttttcccaaagaattcaatatcagtttagtagcaacagtacagttgccatttaaattggtttagttgctgtatatcaccatagcccctgtttacgtcaaacctgtgtctcgctctatatgcactttgtttactctttatacaataaacatactaaagacttcacatgcatatgccttttaatattaagcttgcatcttgaaaagcatttcaaaccattagctgacacagaaaactaacagcgtagactttggggggttggttgtaatgaccttgtactaacatcacttgatttgcatttctgtcttgtaataacgggcacaggctggcatagtggaggacccacatggaatgtgaagtgtctctaagttccctccactgcttcctcctcacactgcagctcccagatagcagtctctagcctccactattctgtgacttagagctgcagccagaggcaggaggtgcagggtcagagcacaccattagtcatctgctgggacctcgtgctggtcatcacctataggaagcgtgtctaggacggtcttcctttcattttttagctgtcattttttcaatgaaagctggtatatgcaataaattaggccaggtaaaattcattataaaacatgtaacatatgtaccagttttagattttataattaatgctggagagcattatcagtcaaaaatgataagtcctccaaataaggttttttaatgatctgatctaggatcattgagatcctacacttcatcagttgtagtctcttaacaatgaacacatagaaatttctagatggaaaaaggttgctcacttaataccaagatcttcggcaa

SEQ ID NO: 864 - protein, 1170 aa, Mus musculus
RSALNGLWKYLNIKEDCNAMAFCAKMRSFKKTEVKQVVPEPGVEVTFYLLDREPLRLGSGEYTAEELCIRAAQECSISPLCHNLFALYDESTKLWYAPNRIITVDDKTSLRLHYRMRFYFTNWHGTNDNEQSVWRHSPKKQKNGYEKKRVPEATPLLDASSLEYLFAQGQYDLIKCLAPIRDPKTEQDGHDIENECLGMAVLAISHYAMMKKMQLPELPKDISYKRYIPETLNKSIRQRNLLTRMRINNVFKDFLKEFNNKTICDSSVSTHDLKVKYLATLETLTKHYGAEIFETSMLLISSENELSRCHSNDSGNVLYEVMVTGNLGIQWRQKPNVVPVEKEKNKLKRKKLEYNKHKKDDERNKLREEWNNFSYFPEITHIVIKESVVSINKQDNKNMELKLSSREEALSFVSLVDGYFRLTADAHHYLCTDVAPPLIVHNIQNGCHGPICTEYAINKLRQEGSEEGMYVLRWSCTDFDNILMTVTCFEKSEVLGGQKQFKNFQIEVQKGRYSLHGSMDHFPSLRDLMNHLKKQILRTDNISFVLKRCCQPKPREISNLLVATKKAQEWQPVYSMSQLSFDRILKKDIIQAFFEAASMMRQVSHKHIVYLYGVCVRDVENIMVEEFVEGGPLDLFMHRKSDALTTPWKFKVAKQLASALSYLEDKDLVHGNVCTKNLLLAREGIDSDIGPFIKLSDPGIPVSVLTRQECIERIPWIAPECVEDSKNLSVAADKWSFGTTLWEICYNGEIPLKDKTLIEVSTCFQTEVDKISDAHGPKERFYESRCRPVTPSCKELADLMTRCMNYDPNQRPFFRAIMRDINKLEEQNPDIVSEKQPTTEVDPTHFEKRFLKRIRDLGEATWTYSFQGHFGKVELCRYDPEGDNTGEQVAVKSLKPESGGNHIADLKKEIEILRNLYHENIVKYKGICMEDGGNGIKLIMEFLPSGSLKEYLPKNKNKINLKQQLKYAIQICKGMDYLGSRQYVHRDLAARNVLVESEHQVKIGDFGLTKAIETDKEYYTVKDDRDSPVFWYAPECLIQCKFYIASDVWSFGVTLHELLTYCDSDFSPMALFLKMIGPTHGQMTVTRLVNTLKEGKRLPCPPNCPDEVAVSPSWEGNCILNVFTACLIQHGRAAFCQADSSDLDAVTSTFKIVSAYSFLTIPWGKLPTVA

SEQ ID NO: 865 - DNA, 73102 bp, Homo sapiens
ggaatgaccaggcattgccactaaatagtttgatactttgaaatggatgccagtttggctaaattcaagtgttgtctgttagacaagggctattcgtaaaagaattgtgaatgtaagcatgctctggactgtgcttcaaggatgcaaaaaagtgtcattgagactgccttcctatgtgcagagtgggaaaaggagcatttatcttgagaaagaataactgcatctgatcaccgttttcaattcattgatagggaaatataattaaagattcctaacctatttcaggatacccatctaccatctaaatctccaagacttggatagcttccccgttcccgagtagttccccattgacaggcatgcactgaactcttcatttacgataaccgttgtttccatgaaatacactgaaaattttgcacagttgcaaggtacacagaatggattttgaattcttttggttgtacgaagcatccctagatgtgatcatgaagttagacacctgggactgtgagaaaataagtcatgtgtaagaagagtggtttggcagaattttaaaaatagaccttccatgctttgtgggtatagtttctacatattctagatctttgtggtaccattatatggctgtaggaggtaaccaactgaagagctttctgggaggagaagcttattgtgaaatgaagactgtgcatatgcgttgtatgggtctcagtccagctgtttgtattgaaacatcataggctatacattgtgagaaaagagaagtaatcttgtggtaaccaaagaagtttgaggtgaaatatgtctcactgtttcatattcagctggggaatgtctcactgttttatattcactttcttatatttgctgaaataaaaacaaaaataaggtaaatttgattagtagtaaccttgttgggtcctttaaaacagtgtttttcaaactgtagtctgttaatctttactgggctgtgaaatctgttttgtgggtcttgtttagcatttaaaaatgtattaaatataagaaaatgtagaatagaaggtagagggaatggcacatagtaaggatcaatatctttttgtgaaacttgtatgtcatatacacacatgtgtactacaaaatatattttttacggtggatcatggtcaaaaaagactgcaaagctgttttaagcatggctgtcagcataggttcctaggatatcagacaatgatgtgtaaccctagctggattcttggctgaatgctaggggaaactggggcagactggggaggagtgagaggtggcacagtggctccagaggcgctgtggtgacctgccgatcctgctctgccctgatgctgctgccgccttggtgaagactaagtgcattactcattatatggatagggttcgctgagagctctgccagcagtttaagattggagtctttgttggcagggcagtttcaaagctgaacataaaaactggttacagttttttggttgagggggccaagtgtaggggggccatgtagagaaagatttttcttgagatttcctggtttttttttgtttgttttttgagacgtagtcttgctctgacacctaggctagagtgcagcagcatgatctttgctctctgcaccctctgcctcccgggttcaagcgattctcctgcctcagcctcctgagtagctgggattacaggcacccaccaccacgcccggctaaccttttttgttttttgttttttgttttttttagtagagacggggtttcaccatattggccaggctggtttcgaactcctgacctcaagtgatccgcccaccttggcgtcccaaagtgctgggattacaggcgtgagccattgtgccccgcctcgttttgttttgttttctctcctaacttacattttgaggcaatagctgagtacctttggtgcatagactgaaatggacatttgccatttggggggttgtctagcattggaaccccctttgtttctagagtggtctcccattgttgctgtggaagctgaaggaggtgcagacacataactgagggcaaactaggttcaacctcttcgattcctcctcgtcaggactttgaatctggagggagtggtgcaaacatacagaggtggcttgagatcattcatggaagcagcagagttgggagtccagtcctggtgatggctggtgaccggtggaggctgtgcgagcagtggtgtccttatcaggctgttcctctgtccttctgtctttcccttaaactcattttacccttaggtaagcagagctggtttctgttgattgtacccaagaacactgagtggatataggaagcatgttagatttgtgtctgccctaaatgaacttagtatgtgacaggtgagaagaagtaggtgaatgcttggtagacacaaatagtaaaatttagcaaggggtggaaggattcagggttgttttcctttgtattcctttaaattatgggtaccttcaagctttgtcagatgacttatcagcaggagattctatgtctttacattgtgacattttggaaatacatgttaataaaaaatgagctatgttaggtgcagtacaaaatggtttcaaacttttataagttagggtttgttttatttgtttcttttttcagttttaagctttttaaaagccttgcgcatactcacagaaaactgatttcctaatgggtgtgagcattttattttagcattaagagatttagggaaatcttgaatcatcatcacaacaaccctgtaaagtagatacttctattattctgaggaaacaaactcaacagaggttaagaaactggcctaaggtctcagacagtgggtgttagagctgggatctggacccaggttagggtgactccaagagcaggcttttaactgcttctataaggaactttggagggcatccaatactttttcattatgcagggtttgagctcagagaggttaagaggcttgctcaacaccaggcaggtcctagtggatctgggctggaacatgggcctctttctgactggtgggaagaagctctcgcacaagctctgttcctcttgcaccctcccctcctttccttgctgtctgcctttttcctgcaagattcttcctgtctgcatactctttcctgcacaattgtgcttgtgattttccttcttcctggcctttatttttattttttttaaagaacagctgtacctttcctctctctttttcagtcttctccatttctgaaaactgagagcagattcctctctccttaatcccctctcagcccaaagcatggcccttgtgtcctctgtttttgactcccatggttctcagtgtctgtctctcagcatgccctcacagcctcttccctggggttcccgtgtatatgttagtcttgccagctgtcagtagattgtaagatttttggcatgctcagatgtatttgtgttacttctttggattcccctgaagtcccacaccttgcccaaggcagagtggtaaatggaaaggggagtgaggctacagctgagaaatgtgtttgagacctatctcacctctcactggccagttgactgtgggaacgccttagccgagtcttcccatctgaaggggctgtgaaactcgaatgtggtttagatgtgaaagccctttttaagccataaagtgctatataaatgcaaggttttattgtgatggcacaagtgcttcagaagtatttttgggataaatgattaaaaagcacatattgtgcctgggtgagttggttcatgcctgtaaccttaacaatttgggaggctgagatgggaggattgcttgagcccaggagtatgagaccaccttgggcaccatagtgagacccctttcccaaaaacaacaacaacaaaaattaactgaatgtggtagtgtgcacctgttatcccaccttcttgggaggctgaggcaggaggttcacttgaacccaggaggtcaaggctgcagtgagccatgattgtgccactatattccagcgtgggtgacagagcgagattccatccccctccatcccccccaaaaaagcacatactatgaagacaagccattctccccaccccgccatgttttgagtgtccatttgtgccaccaagtctttgaccctggggtaaggatatggatggcttcactaaatcttatattcattgctctttaataagattatggatgtgttagtggtaattagtttaaaagaagaaaaagttttttagaaaaggaaaagtaacaaagtctcttggtacaatgtggcttttagaaagacacttactgactttaagcaaagtactgtatttacttttatcaaaaactgtctctcactgaatgcaggctccttgggagcagtgcgaagcaccgaaccattgagctggcattgattatttaatcatccctagtttattgtaaatgaagcagcacttacggttctggggtattcctggaattgctgctatagttagaagtgagttattctgtgtggcaggagtggcatatagaaaagccatagttctgacttcctgacaggaaaaatagcagattttgtatttatatgatgtcgtccttttggctggaatccatcagctttacagtatcttgtgatgctttcatcagaactgttattccacgtctcagcatagcagtggggtcccagtagcaatagatacaagtcattttcggtggctctatgggtgtgaagccactggcagtttccctggcttgttgtgtaggttaggctgttaggaggcttcctgttcacatgttgctaggactttcctctcacactgtggcagtggtgccagggcagagcattagtagtgggcaggaacacagggaaggctggggccatgcagtgattttttaaatgacagtcctttcagtctacagaaggaagagtgttggagtaagatcagtctcctgggtggttgttagactatgaaaagtactaaaaaaccagagaagacagtggtgttgctgatggggacagtttagagcagttcttccccactgtggaacgagcagggtccttagaatcagtagtcacgtgtttgactcctggcactctcgctgattagcgtaaaacctctcatgctttttatgagaattaagtgcgagtgcctaactccaggctcaagatattgaaatgcttagtagatattgttttttttttccttgactggaactgtatatttcatcaagctgtaatcagtttaacaaattatggtcaaaatatgagtgcttactgcatgctaaactctgttgggcattttacatgcattgactgacttaactcttaatagcccagtgagataaatgctatttttatctccccacttacaccaagaacattgaaggttagggatattaactaacttgcctaagattacaatagctagtcggtggagacgccagaattcaaacccaggttgcaatgactccagcccgtgctcttaactgctttgctgtgtcatctgagctttatgaaatggggttttgatttgtatctaggcttttgctcagaatccctatttagactttgctcttcgaagcagattcatagcccactttagtcctgtgccataaagactattttatattgcgtcaatacctttttgtacacttacacatctatagcctcttgcaaaaagggcattgtaggtacttgatgaagagtttttgaaagttgtttgtttttaaaaagagacaacatcttgccatattgcccaggctggactcaaactcctggggcttaagcagttctcctgcctcaacttctcactgaaagatatttttaatccttgtaccaaccctctaggcaggatgtttcctcttaggttaatgggtagggaaactggcttagatgaaaatgacttgctcatggtcacacttgctagtatagagttagtgggaacctacacaccttggattactgtgctttttttcattgcataatgttgcttactttgtaccttcatctttcatttacagctgttaccgaacatacttcttgatcacctaatttgtgctgaggataaagcactaaatacaagacaaaaaaaaaaaatcctgatcttcctgtagttttcattgttgtgttaggtttccttaccaacgttaagactgctgcctgctgaaatagttgattaaggcttaagatttttagtcttaaaatttcttaagatattaagaagctgatttcagggcattttctaaattacatatttttctttcagtttttctgagttcataccttaattcataaacattttagttgtattttctacttcagaaatcaaaaggtttgattcctttaaggcaaacacaaagtaattcattgtaggtgtgatggtttcttttatatccatagtattttaattcttgtcattgagtttcactgtcaaccagtctgtttttaacggtaaaaatctggcagtggcccttggccaaagtggtctcattctgatgatcatatttatgaacattaaaatagtctatttttatttccttgtccactatccaaaatgtgtgttcttcccttgcgcagataccagtctttcaaaagatgcccttgaaaatttaagagagttccagttttttcagatagatttctggaattttgcatcttggaaaaatttctgacattttatctattgcagtgaggctttgttccaacccacagaattgtgtcttgtttcttttattttttcccttgttgagaaagtgtcagatatacttgtcttttttataagactgtggtaaactgaagcaatttgagtaacccacaaaatttccctgatttttttttcatgtaaaacagcacctacaaaattgagctacaaaagtaatcctctgtcaccaaaagaaaggtattttctttcaaatccttgacaattttataaataaattcgggtggaagaattcactgctatcaccaaaaaccttctgattactcttcctggtccttcctgttttctaagtgtctttatattcatttgagttgggaattgaacccagtgaatcatgttctttttaaagggtattttgtgattgctcctggtgaatctttctagcattgatgatttttccttttgtatattgcagcaagaaacttgaatttatttcttggaattatccaaagtgtttattaatataaactgatcttgctccttttctacttgctctaaaaataatcagctagatcacattgtctggtttattttagaagaaatattatttggatgaagccattacacaaatgctgtagcacacacacaaaaaaaccgcttgtcatcctgaatgaggacagttgtcatttcatataaagtggatcagcagccttaggtttaaagtgcttagaacagtgcctcccatgtcttctaagtgctatgtgggtgttttctatttttatcatcagaatggcaattccctgagagtagagattttgttgttattgaatcggcattcaaaagcatcacagttaatgcatattgtcttgaaattctgttgctgttcttgttttctcgaagagtttaatctctaggctaagcatcacaaatctataccattttactgttgtgttcaataatactggaggtcagtttgaagattaggtataatgtgattgcaatgtagtattgcttgcagaagagacagaatgattggaaaaccaaactccccttgattactggtttttgtagaattctagttctaaaagaatcttagtgattttagtcagatccttgaatcttacatgaggctaagagaagttccatgactcctaagttgaagtaacacatggtctgatagtgcatattaaaaaactttttaagttctggccaggtgtggtggctcacgcctgtaatcccagcactttgggaggctgaggcgggcggatcacgaggtcaagagatcgagaccatcctggccaacatggtgaaaccctgtctctactaaaaatacaaaaaatagctggacgtagtggcgcatgcctgtagtcccagctactcgggaggctgaggcatgagaatcacttgaatctgggaggcagaggttgcagtgagctgagatcatgccactgcactccagcctggcgacagagtgagacttaggctcaaacaaaacaaaacaaaacaacaacagaaaaacacctttgtaagttctaaaaaggtttatatggtagcccttctgaatggagcctgggcctggtggaacttacagttctcttcctgtcctaaaaggctgagttgtgaccctttccgggtttgaggcatgcttttcagtactcccctctggtcagttttcactgatccttggcagctggtaacggtatgctgtgaggaaacctggggtagacaggctccagacatgcagttagcaagcactgcctatggactggctagtgctgttgggtgcccaagtgtaaaaaggagtattgtgaggttttcctgttcaagcaacgggagagacaagcctagctcctttctgctataggacctttttccccacacatgctgatccttttgctgagactgctatctccgttttggcttcatgccccacctccatggacatccattgcatcttaactcaatgtcccttccctcctgagccccagaccagatcacattccctctattttatgttctctacttttccttcatagcattttagctctttgtaatgacctctttctgtacatcttagtttgattccattcttcccattgactgtaagctccacgtaggcagggaccgtattgcccttgtcctttgaattagcttagtttctgcagagctgtttgaaaatacttgttgaaagagtgaatctcttcaacaagtatagcatctgaagtcctgcttatgagcagaagcaaggcattagcatgtagctagtttctaagtgctgttctgaggcagggcagggtgtttattcacataattaaaacaattgattatattaatttttaaaaaacttttgtgcagtgattttaatcttgttaaaattggccataccaaaatagccaaatcaaagtcatcacaatcaaattcatacttgtctcccctgccgggctttccatcattacttttacttaagtcttacccactgcagaaagccttcccaagccagcccttgccagtgtcagtcaccagagctaacaacatcctgacgcactcacactattgattttaggttgcttttgtgtttccatttgtgctgtctccaaccttctattgtaaggccctgtggggatgctggcctcgtggcctcagaggtaacccatctccctctcccccttcgctgctgccctgtaatgcctgggactatgctcttcctaaaactggattctgataaaatgtgttgagtggccagacagaaaactgaggtgataatcactgttaatttgagaaccaattttgaatcaccaaggttggtagcttattatttgcaaaaataattggattctactgttaaagaatttgtgagaagcaacaaggaaagctgttaaaataatacaaagctctgtgtgtgtgtgtgtgtgtgtgtgtgtgtgtgtgtgtgtgtagacaaggttggggcggggtaattctagaaggaatgagaaattaaagtgcgcgtttttgggtgtcttaaactattgttcacacaatcaggagaggggctgttgatggaaaaagcacacaatcttcatttacattggacaggacactccatatcgggaagcaaaaatccctggcttcctttcttgatgcggtgaagttagtatcctctttgatgtttgcaccctaagatgtctctctgtcctctcgatgtcctaggccatttttttgttttgttttgtttttttccttcttcctctcaaatgctttttcttgcctgcttatggtttgggctgcttccttaatgaaaatgccctcttattttcagatgcaattacctctgccactgatttatttatttatttttgtctttagcgcttctctgaagtagctttggaaagtagagaagaaaatccagtttgcttcttggagaacactggacagctgaataaatgcaggtatgtagatttgcatatttttaaaaaaggaaaatatctggctttaaaaaaattgatgaaaccgtgttcttgaggctgtagggctattggtgctattgcctttaattttttgaaattgatgtatttattcattcccaatgttgagtatgctggttaaaaaaaacctcaaatacaaaagtataggaggtacagagtaaaagttaaacttcccttgtaatctctcctagatgttcaccactattaagaatttattgtacgttcttctagattttaatatgcatgtgcataatcatattatacatgttgtgcatatgcatgatcatactatccatattatgcttttttcattttgcagaatgtcctgtgcatctttctgtgttgattcatatgcagctttatgttatcctttttgacagccacatagtagtcctgcctgttttgtttagtgagtcctctcctactggacattgtcagttggatttttttcttatttcttttttttttttgagtcggactcttgctctgtcaccaggctggagtgcagtggtgtgatctcggctcgcggcaacctccgctttcccaggttcaagcaattctcctgtctcagcctcccgagtaggtgggattacaggcgcatgccaccacgcccagctaatttttctatttttagtggagacaggggtttcaccatgttggtcaggctggtctcaatctcgtgacctcgtgatccgcccgccttggcctcccaaagtgctgggattacaggcatgagccaccacacccagccgattttttcatatttcaaacaatgtgacatcctgtaaatatataattacatgcatttgcctgtttatttccttagagttagagggtgcaacactgtctttggattcttcccctgtcacgtctataaagactctcaaggacaaaggtttatcttacattatgaagcaggcttttagctactctgttttccatcacagtttttcaatgtgggatggggttaggggttcagtgctgggttttcaagtggtcttgcttgttgatctgaatttcaaggttaattatgaactaactgtttcaggctggtttccagaagattctggtcttcagatttatttggaaattaaacagttaaaattgaatacctctcagtttgtagcattgaggcatatctggttaatgtccctcttttcagaatctctcctcaccaggggagctaatagaccaagcaaatgaatttggtgaagagaactgtgactgctgtctgccctgtatgacttttcttgtttgggggagcctccttgggtcattctgcaagcacccattatgtgtaagcctctgtgcttcttacggatatagagaaaaatgactcagttcttatctcaaggaactcacagcatgtgcataagatgcttaaatttcctgtggctagtgcagtgggataagtttaggagcaagaagcgagggccttagggaatgggatggaggttcagagatggcttcctgcaggaggcgatatctgagctgaattctaaagaaagttgaagtttgccatgcaagggataaggtagaaagatattcctatagaggaatcagtgtgagtgaaggcaggagggtgagaagtagcattgggtaggggaggatacagtaacactgacagccttgtgggtttcaagcatgaagcaagaagctcagagtgatagaagataaggtgaggaaggctggccggccagatgatggagcagggctctgtttcagagtctcagaattgctctgtagattaatgggaagcccttggaggatctggtatgtgttatggagaaattactttaggggtttaagtgaaggttggcttggcagacaggaagaaagtagtaggagtgtggggtcagcgaattagtttgtagcccattggtattgggcaagaagaagaaagaatgtgtagggctttccctcatttctttcctcctttctggccttgcccaaggctaagttgctgaggttggttctttggccctaggtgctctccctttggagggtgcttatgtgaattacttacttacgcacttttcaccagggttttctaactgttccaaagtaaggcctcctcctgccctcctggtgctgcgtcaaagtcctgccgctcctcctggggtggtaggaaccaggctccattcattaattgttatggcccttccatgtgacttatgaacatgaattggtcatcattttgtgtgcagtgtctcaggtggggatgtgaagagagataagatacggttcatgccctcaccatgcttgctttttagtgggagatggacatgaaattaaaatgctgattcttgccataagtctgttcaaagcttatgtgattccagtagaaacagcagcagaatttgtaactaataatcagtcctttaacattgttggttccagaatgggctacatttttcaattacaacttgggtgcaaatggagaaaataaattcaggccatgtctaaaattattctgatttttgaaaatatggtctgaccatattttcaaaaatacataattaataaattacaattcattaattagtatgcataattattttccatggtttcatctcttatgagatctgacatgtttggtttccaggaagggaaggggcaggggagaggtacgtatccaataccaacaccaaatgtttctgcttttttaccttcagaacactcccttttgccataagaacttttagcacatagagtgaccacatagtcttgttttccttccacaacagtatctaaatataaaagaggactgcaatgccatggctttctgtgctaaaatgaggagctccaagaagactgaggtgaacctggaggcccctgagccaggggtggaagtgatcttctatctgtcggacagggagcccctccggctgggcagtggagagtacacagcagaggaactgtgcatcagggctgcacaggcatgccgtgagtactggcagctgcccagggctgggggtttcaccaacacactagttcagaagatctgggggtctctgccccttgtagcgctgctgggcagaaagagttgtggactctggagtcaggttcctccctgcctctgccactgccacttgcacgtgaccttaggccagtgattctaattctgagggtttcgcttttcactttcttcatctgcagagtggcttctttctgctccgtcactaatgaactataagataccaggggatgacgcttgacttctgtggatccaggctcagttctcatttccccacatctgtacaattggaataatatcagcactagatgaggtgctacgtaaaacacctgggactaagtccctgctcagcaagtagcgtatctcaatatcttaataattattcgaaacttctcctaaaaagtttgacccctccttctgctgccgtgactgccctcccatgcgtggtgctgagttgaagtgagaagctgagtgttgctttgtggcttagtcaagttcccaagttgtgaaaaggacgaggctctcaacaacacaagcttttttttctcctttcaagtgagagttgtcttaaagttagcctgttgccctcagaaggtgggaaaccaaagtccctttcatcctttgaacttgaggacattggcagtttttgcttgcctgattttaaatgacaagttaaatcatagaaattaagttaaatcacagatctaatccacttggattgtgatgatggttgtacaactgagtaaatacactagaatctgttgaattgtacacttaaaaattggtgaattttataatatgtaaattatatctcaaagctgttttaaaaaggttctatcaactcgttttatgatgatgaagtagccatttatgatgccgtacagcctgatccctactttacttatcccacctttaaccctcagaacaactctgaggggataggttggttattttaagaattgcttatcttgttagtagtacagcttgtttagaaaacctaccttctttctgatatttgtctttctgcctaaaatcttcacacaccagagtttcaggaaaaggggagaggcttatggtatggggaagagcgtagtaggctcttactgactaaacctgacacagaataaaatgggctgaggtgtatagattattagtgggaaaaatccagtaatattgtcaagttattttgactaggccgcaatgtgtacaaataaccatctttagacagcagctttaagtgtgtttgtaattatcagaacacctagatgtaaatcagtggttctaaagttttttttaaggctttgtttttttgttttctccctttccccttgagatttggtttatattgtttattctcttcgccaagcttcttgccatcagcacagcaggtataaacctcactcagtttgtaagcaaaggtcattgttgcagagtcattgggctgctgttaatgagggaccaaggagctgctgggaaagagatgagaggagagagcctgtgagtctgaggatggacacagtcgctggacctcctataactctgggcttagggtcagccagtttggggtgtcggtttctagcctaccttatagaaaatgagtggtgtctcttctgtaactggctcaacagaatattgcagaaactcatcaatttcagaaatacatactgaatgccacaggttcttgtagctctcactgttactacagaaagtgatgtttgagggcagtattgttttctttcctgtttttcacctctgtggggtaaagttttgtttagttctcattgattcaccccctcagtagctgtgtcttggtttgattctcagctctgcattttactagatgagtaaccttgaatcatactaaatctcaggagaccacagattcttcgtctgcaagatggtcaaaatagtatttacctcattagatattaggaggattaaagggtaatacttttttttaaatttaaaattttaatattttttagagatggggtcttgctctgtcccctagactggagtgcagtggttccatcatagctcactataactgtgacctcctgggctcaaaaggtcctccagtcttagcctcccaagtaactatgactacaggcatgtgccaccatgcctggctcatttttattatttatggaggtcttgatatgttgcccaggctggtgtcgaactcttgacctcaagtgatcctcctgctttagcctcctgaagttttgggattacaggtgtgagccaccaaactcagccaaaaaattatttatttatttatttatttgtttgtttgtttgtttgagacagagtctttctctgtcacctaggagtgcagtggcatgatcttggctcactactacctccacctcccaggttcaagcgattctcctgccttagcctcccgaatagctgggattacaggtgcacaccaccacgcctggctgtggggtttcaccatgttggccaggctggtcttgaactcctgacttcaagcgatctgcctgcctgggcctcccacagtgctgagaatattataggcctgagccactttgcccggccaagataataaatttagagtctgtttgcctgatgcctgacacttagccctcagtaaatgttagtattattgttttactactcagtacttttatataaagagatatgtctttgatctttctgtttatgggtagtaatactgttagaatcagacctgtgttagaattacagacagttccatgattaaaataagttacacttcagatatgtaagtgttggtgcacattcaaatgtggatatgcataaagaaaggctgggtttccagcccagtccacaaaagccactttatgaatgaaaatctatagcatatttgaattatttgtcctaataatactgaatccaaaagccatttgcctatgttcccaaggaaaacttccctttacagtttaactccatattctcggtttataagaaagactataacttctgaagggtaactgttcatattgcttgagaagcatggattgaggtgttcaggagagcactagatagctgccaaggtatctgtagcttcttaactcagtgtctgcgttggagagagtccccgcctgggtgtgctgggccagggagggggccctgtcagtgtcagtctcactgcagatgtccgatttgggaaacaagtgcctattacctcatattctcccaggttttttgtcatttaagtttacctcatcttagtttgaggcctggctgcttatgaaaatatcagtaatagctgattattggcagtcattctccccccaacctgcctatgtttcaggttcataaaattttaatcatgggcgtagaagtgagtgacttcataatctccctggtctttcccatcattctcttattgacggaggcaactggtggagtggagaggcaggggagcactgttgggccagctttgtgaagccatatatcttcttgctagttggttactaaataaaaaatatttgtgataatcatacagagtacttaagaagtatatttattattaatggtaatagattttaatcactgacaaaaatcactttggttattatttattctaatatgcattttgcatactactgccaggaatttgtttgcatgtctgatgtataatcacgagcgtgttagaattgtttaagtgctttctgtaggaaacagatggaagatttccccaactcccagagtgtttccgattagcaaagtgcacatcaggcaggatctgtgaacctctcagataggggtttttttgaagctggatttgataagactctgtgacggatacctgtaatgagaaatatcatcagagttttatttttaaatgatctaaatttggtttgccaggagctacagtgcatatttctggggagtcatagttcttgatgattatgatcaaaacagcctgaccgaacctggtcggaagtctgtttgccctaagaggatatgagtgacccagattctttgtggatgagagagttccttatctttgcatatattgggtttagaaacagatggccaaatgtatccgccttgattttctgatgtgtttttttacttttcctcaggtatctctcctctttgtcacaacctctttgccctgtatgacgagaacaccaagctctggtatgctccaaatcgcaccatcaccgttgatgacaagatgtccctccggctccactaccggatgaggtatgggaagtactgacctggtacctgcctggctccctctgcactgagggacagtggtcagcctggagccctgagtcacttaccaagaagtattgtagtcatttttgtaatttgtaacttttgtatttgcttgatgtgagaaaggacttcttcagtatttggaatacaattcaagatgagtttgatcaccttcctctgccacattttagaaaagaaatcttgataaggcagaggatattttgaatagaattagtgtcctacagcagagtttttcaaatgggtaatcatagttatgaatttaatttagtggattcacagttatgaattcaatttaatttagtgaatttaagaaaaagaaacaggagacgatactatcagcatatatacataacctaagtatattttttaaacttttgagatatatatatatatatatatatatatatatatatagatatatatacacactatatatataaaggtcatgatataaaatatttttcttactaaagttgcaactaaaaagctcgagaaacattgcctgaagtgttaactagaaattctaggttggccttgctctctgggagtggatgttttgactactccttgaggatttttggctgtggagctgtaatttttcttctgatgggcacctgccttttctcccatattgcagactttgagaaatgtcacaggtgacacagacagtcagtacttcaatagctgcagtctcctgagtttgtaaacatatttgttcagtaactagaatggaaaatatgttagttacatacttgctaagcagaagttaatgtgtgtttagcagtggagattataaatagggtggatcctttttgaaaagcaggttaacttacagaggtattaaaacagtagataagctcagatgctaatagaatgcagggatttgctagaaaagccctctgaaatctcggagacttcacagtatcatagctactatttttgggagaatttggtggagttgtcaccattacacaatgactgggatgtttttctcagtggacactgaaccagatctaactttctttgataatcatcctagggctgactttttcctcttctttctatgcttaaccaaagtctcacctggagaggaaagctgtgtgccgtggagatttcaggtcccagctgagccttctggctattggctttgtttttccacatgtaatcttgctttttgtggcctggggattggctgtgtgatcagcattgaaatgggttgttgcagtttgaagtctggaaggggtatgtccctgggttctaattctttccctctaggtttctgtactcagctcagagtctagaatggtagcttttaggattggaaaagaccaaagttacctaattcaactctttcatttttttttcagtggaaaaactaatacccagaaaagggaagagagttaacccaaaaattacatctagtgaattgtctgattagctttacaattgaggcattgtagagctctttgaggcattagtcttggttgtctgagtgcctggctattaaaggctgtctttgcctgttccctctttctgttagctgcctggaagtgcagggttgcttcacttttagcaccttgactctgtacctgacatggtgcttcaacaggatattgctttgttaccacaggccctttgaacttggaaaaaaaaaataccaccctaagctaaaacatttgcctgatgacaaactacaaagattttgaaacctcataatctcaccactaaaggaggcgtaaatgaaaataaatgttggtgatgatttcagtggagtaccagttttactttgggaaatattcttgtatttcaattatcgttttctgtttttagataatgcttttgatagttgttgggtaatcatagttatcctcaggtatctctcctctttgtcacaacctctttgccccgtatgatgagaacaccaagctcttatatatatatcttagcataagacaaccatattctgtattccttttcaaaaaatattttcttgcttttttaaacaattgaatttcacagtccattaaaacattttatagaagcctaaagagagtttgttgtgtataatatctgcatataaacttaaaatatgcagttatctgtacataattttctcaaaaacttgcagtgcgtagctctgattgatgtctatttgtcttttttttctttctcctttcttcctgctttgttcctccacgtcattttgaaaaggaatataggcaggtatcattctacatttattgatgtcatttttaattttttttccattggcatgctatagtatctggaatttttgtgtaccaggtttgatgagcacctttataattaattttaaaaaggtgtgtggaatgtctgtcttcagtgtgtcttcaagcttggtcttatgggtgatagggagggtactgattctggtagtcatggatttaaaattttgttaatatttttgacatcttattaaggagaaagctgccggccttattttaggctccctcatcttctgtttacctttagcctttgttccagtggagaagctacacattatgtttggtctcctcagcctgatgctgtctgagtatctgacctaaaggcttccaagacaaagatggtcccacagggctctcagcagcctggaagaatatcgttgttcagaccagattgaagattgtgttctgcccagagggagtttgttgggccctcatctctaccagatccaaggactgtttctcacagagactcagtaggatgtggaagaagaaggccgtggctccgttggctcagggaacatctgccttttcccctcctgccacctcccctggcagtggagggtgacctgtctctctccttggcacctcatcagagattcttctctcttggacaacaccctccatcctcggaacccttttctttccttatctcgggaaaccttccatattgtacctacttctcattctcttattactgccttcctccgccatcaaacagcatttacccctcctgttggccattctgtcagaacccctctttgaacctctgtagctggttcactccttccttcctgcttgtcccagggagaggatcgtggctaagttctcctgggcacgtgttctgttctacccttgaagagcagtgccaggcctgggtacagcatgagtggcagcctccctgccagctgatagccctagctttccactgtcaccagcggagggtaagggaacagtccagcagcttcagaggcctgacgtggctcatgctgcccgtggctctgcagatgtgtgattctttctgtgtgtgagagagacaccaaagcccacagtcaaattctcagtcactttcgtaaattacaaggaagatgggctgtatagaatcattgaagattataaaaatgttggtttttacctttaaagtaacttctttgtttatcctttccatgttaattgctactccctgagtttattcatcttttgtttatctatcaagcatgtgttcagtagctgttaggtaccaggcactgggattcagtggtgagcaggacagctgcagcctttgcttccgtgcacagctcacggcattgctcgaatgatgccacaggcatctgcttctctctgccgcttccgtttctatcttccatggggcttccctcccaggagagcgtgcctcatatgtgcctggctttcgttctttgctctgcctgctttgcatggtccaggctctgtagcctggcatttaattattctgttccagcttcccttccttggtgctttttcccctcctgccacctcccctggcaatggagggcgacctgtctcctcggcacctcgccagagactgtcatatgtccaaggacaacttatcctttaagcacagtgcctagagcacacacttgttaggggcccataaaatgtctaatttcacttaaaatcagaaaacatagttgagaaatataacttgtaatattttttatggaggaagggaaaagtgtttagggcctatggaagtcacagtgtagtcctgcttgtgatacgtgccccattgtgtgttgctggatagttgctgctggacctgaccggttgctcccagagacaggaactcacagagtacgagaaacatgcctgagagccctccacatctcaggccctaactcagggcctggcttgtcttaggctctgcaaacatagcacagtgacagttgttgaagtgtagcagcagctttttgcagggaaagagggagttgtatttattgcttctccatgacatggttcttttctcattagttcatgggcaagtcaagggaaagagacctaggtagcagctgagtctgtagcctacagatggcctgggctggcttggctcagtcacttcccttagtcacttccacacattccagaaattgtgtttttcttacaggtgacagaggaagttatatatggaaggtagggttaggggcaccaaccccctgtgcaattgacaatccatgcataactttgaccctccaaaacatagctaataataatagcccactgttgactggaagccttaccaataacataaacagactagtaacctgtatatatcttatgtattcatgatgtacctttttctgaaattaaaaaaaaaaaatttctgtgctacacagttcgtcagttttttcaaactgttgcaaatctccaaaaaaattttcaatatacttattgaaaaaaaaatctgtgtatgaatggacttctgtggttcaaacccatgctgttcaagggtcaactgtagtagttaagagaacaggcttttgtagttttaggtcacctagcctcttggaatctcagttttcctcatctgtaaaatgaatgaaaccttccttgtagagttgctgtgaagattaaataacataatatatataaagtgcttgttaactcgtttcatgatgcctgtagtggtgtttgggtagctctcttttaaaatcctattcatcatgtaagatacaccatcagttgaatagcagcaatctgggaagtaggaaacactgccacgtaagctgtatatcttgattgcgtgatgaaactaagttgcaggaatgttaaaatgtcaatcaaattggtcttggattcgaggtagaatgggcttagcagtgtggctgatggtaagcgtgcagggagctgtggtcagcatggagttccagtcagcaggtgtttccctattctggaagcatagtgagaagtcagaggagctgtctttgtgatcttcgggaagtcactttagctccctgagtcatagaggaggtgctgatgggacacttctcacgcagcgctagtaagaaggaaagagatggtgaggggctacaaggggcagggttgtctgcctgcttctcagggcacttcagcctccggcactgaccactgttggtgagccaggacgccctgcccacatctgggtcccctttgccacaattggcattcattttcctgccttccaggttctatttcaccaattggcatggaaccaacgacaatgagcagtcagtgtggcgtcattctccaaagaagcagaaaaatggctacgagaaaaaaaagattccagatgcaacccctctccttgatgccagctcactggagtatctgtttgctcaggtaggaagtttgggcccaggagaagctggagtttgtgggatgggagaggcattgtagagctcagaccccctgctgcagctgaacttggtggtgctagagtgctttaaggcctgttctgggtaagttcttgccacacctggacttgccccaagtgaggagaaaaaaggcagcatttcagctttccaagaggctggttatccagcttgtgggctttggggcttcctttctttcctattcctttccttttccccacctcctaccattttatttttcatccgtattaatagccttatgtgcagaggtcagagggaagctctgcttgttagaagatgtaattcaacagggctgaagaaggcacttctcagcagccgtagtaatgtctggggaggaaggagatggccactctgtcactggtggtaggatagaaagattagacgctagaaaaaaaacaaaagagaaggtagaatcacctgaaattacatttactctgagattgctaagatttttagtagtatgcttcctgattttaacatgcaaatttagatactgtatagattttgaaaatattttatggttcattttgttttgtaaactgcttttttattcatctgattttttttattgtttgtccttcaaatgtcaattaaaatattgatcttcgttgttttaatgactttgtaacaattcatttattcaacaaatattgactggatgtctgcgtactatttgcctcaggcacttgtacctgctaagatgctggagatgctggagtgaacaagacagacatggcctctgcatgcatcagatgtacatcaagttagaaaacaagcaaataaaatgatacatagataatacgtaagaaattatggaaagtactgtgaaagcagaagcttgcaatagagaatatggacaggggggtttgaatgggaagacctaatttaaatcatatgatcagagaaggtctctctaaggaggtaacatttataatgaatcctgaagaataaaaaggaatctgcaattctaagagaggggtgggggactatttcttccatgtagagtgtctcagcagcagcactactgaccttttggcccagatgattctttgctgtgatggcctgccctatgcattgtagggtatttaccagcatccctgcctccacccagtagatgccagtagcactctctccttagcagtgatgaccaaaaatgtcttcaatattgccgactctcctctcagcctcagttgaaaagatctgatgtagagggaacagaatgggggaaggccctgagggccagtagagctgcaaggagagaccatgtggctgcagaccagaggagggtgatggggaacgaggctggagaggcaggtgggggcagattgcatacacagagccttgtaggagctggcaaggggttatgctttaaccctgagtgtggtgggaagccatttggaaggcttcattttatgtatgtttcaagtcgatgattcttgttacacgtggaaagcagattgtgctgggtccaagagtacactcgaaacatacaagctgagagtctgcagcaatgatcctgggagagaaaatgctggtttggcctagtgtagcaacagtggcagtggagcaaaatgagtagatctgctgttcatcttgaagatagaattgataggatttgctgttgagttggatgtggaagctgagagaatttgaggaatcaaagatgatgactgggtttctgttttgggtgatgtcggatggataatggagtcattccccacacagggaaggtcttgggggaagagggtggggaaggggcagaaatcaggagtcctttttcggagatgcctgtgaaacatacaagtggagatttcaagtaggaaattgagtaatgaggctggagtccagaggaaaagccgtcatttatttaacttagtcacccgttcctggacattttctgtttttctcgttttcccttttatgctattactttatagtctgttgtgaacaactgcatacgtaggtggtcctgtacacgttctgtttattattaccttagagtataccattatgtgtgagatcacacacgtatcagtatatctgtgtcagagttatgtcccactgtagggctttagttactaattgtccattatctccattccatctatgccttagaactgccatagagacaacagagaaaggggacagtgcacagccccaggcagatactgtgtggaaaaaaagaaaatgaactggccatttttagatggtctttttggattcagcttcccagttttgtgtatccatagctgagatttattctttacctttcccgggagcagaggtgtaaaggaagagtgtgccatacttgaagaataagcatggcgttagattgaccttttggaggctcaggaataagtgacttgaggtagctgtacagtgaatgtttacaaaaaaaccacaggccaacaggacagtttcaggttttcctttgctcttcacacattactggcatagatcattgttcctcagaagtttttggaatgtcagtgacctttcctcacctgagagaaacaagatatcccatggtgaaaagaagagaaacgggagcagtgggagccctccatccaaaaaccattaatctgaagttcttcagggaaagagagcatctcacatatgcaggaacacttctcccaggctttgtgcctgccctgctccaagctggagaaaggcttaagagttcacactttagtgttctatgtactttaagtcatttgatgaaaaccgaatgtggctgtagcacggcattgaacagtggtcctggccaggtctagatttaatcccagcctaccacttgctaagccctgggcccccagggtactcaattcttctacttgacttggggttttataactgcctgacgttagatactcctagtcatttattcttttctttctccttagagtggaatctccaggagatcaggaacgtggtttagtttattgctgtttccctagcacctagaataacatctagcccataattagttctcaataattaccaaatgaaggagtgactgaataggggctgtttactgttttgtgccttagattcctcatctgttggagatgacgatgttaacatccacgttgtaaggtgttatgaggactaaataaaggagccaagcactgtgtggcagcactgaggcagggtttaatcagtgggagccggcactggaattatcgttttcactctgtacaaagctgggctgggcactgctggttagccttgttttagtttttgtgtttaaagttcccgttagttcttagaatgctgtgcacctccatcagtgggggggtatattttggtgacacatttcactatgggaaactcgaacggtagatgtgggaaaatgtacatgtggtgatgatgcactgcggaacgttcccctttccctagagctacaccagaatggagggagagccccatcaactctgtacacccagctcctagacaaggccatctaagcatgtttgtggaattcatgcatgatcagacctcagcccagtgtcaccttcccttgctctggcgcagtccaggcctagtacacagtgtttgtcagcgtcacttctatggcgaagggacttcgtatgtctgtactgttccccagtgcctggcatagtgctcagtcaatgttttgttaaatgaatgagcgggggagaacatctcctgagccccttcacacccaactctgtttaaaagagctctgatgctagagaaactgccaatctgattcgtctcgttgctgtgctgcgtttctaggcggcccctccctgtgtagtagccttcttgtcaagatcaaaaacgggtgggctctcatggtttctcccccttgctcctagggacagtatgatttggtgaaatgcctggctcctattcgagaccccaagaccgagcaggatggacatgatattgagaacgagtgtctagggatggctgtcctggccatctcacactatgccatgatgaagaagatgcagttgccagaactgcccaaggacatcaggtaaagcttcccactggctgaagaattgattgtgaggatggtggtgtttctacatgttcttacacatttcagcttaattactgccagggtttggctgacctttgctctctatgaaacccagatcttccttagaatgtttactacatacacgtagcctaattataattgtgtcttgattttggatgttggctgctaatctcagaaatttgtgcttgggtgaaatttctgagctgaggatgccaataaaattagtggcccccaggccttctccgtcccctccttgcccatggtggacactgtcgtctatcactgcattttttccttttgttttggacccatcttaaaaatccttctcagtacagttctgtaagcagctactaccatcccaagcctgaactctgaacacgttacagtagttcactacagagctgttaattctaatgtgagaattgatcaactactattaaatatctcaagaaaattgcatttacttaaaaatatcgtttgagatcaagtctctgtgaaggaatatttaagttctgtccatctatgacatccaatagttttttttcaccagtgggctattaggatggtcataaatgaagacagtctcattttgaagaagggatttcgtagctgcattgtttgtgataggcggcgtgcgtcttctcattaggttgctgcttgtttctccttgcgcttgaccagagtctagagcagatcacagcttgctcctcagtgatgcagggattgagtcgatactgctcaactgctgctttctcttttttctgtggccttcactttgggtacttcctctttattttttcataagctaaattgaaaaatgacagttcttctctaattctgttatattacattaatctaaaagaaaaataacatttgttgaggatgaatcccaaacttcacaattttctactgttctgaagccactccatgcggcagggatgacccggggccaggtgctgtctcagtcctgggagtaacaagcagatcagtctccgcatttggcccccagtggacttgttctttgtttcaggggtactcaacgttcttcttaacattgactcccgttctagcagtatatcagcttgtttagattctgtttgttgtagatagtcgcccactagcacctggataggtaactaatctttcagcttacctgttgatcttttaaataatatatctgattcatattcacatggcaaacactaagtcttttgtattaattagctttagtatgtctttctctctctctctctcactctctctctctctctcttttttgtgggggtgcttggggggacggagttttgctgttgttgcccaggctgaagtacaatggcatgatcttggctcaccgcaactttggcctcccaggttcaagcgattctcctgcctcagcctcctgagtagctgggattacaggcatgtgccaccatacctggctacttttatatttttagtacagatggggtttctccatgttggtcaagctggtctctcactcccgacctcagatgatccgcccgcctcggcctcccaaagtgctgggattacaggcgtgagccaccgcccccagcctttctttctcatttttaaaataaaaaatgtgatctgtttagaaaagttataaatcagacatgcaaatagaacatacaaagcatttctcatcacacaaaatgacaattgctcctaacaccttgcagaccattttctaactgatgctcaatcctagtaacagtgtgtagatgtgagtactaatgtgcacaagaatggtgaagctagcaagcaaaaatgtagatgccctgccttggtgacccagaaaattgggcaatacttgtagcaattcccatttcagtgaaatctgtggagcatgtgctttgcttttctttcccagtttctattcacctgcatctccttatgatggtcatcttcagtgctaactccatctaacgtcctctgggaatagatctccctttcccatttggcaacatgtggattcatggacttagatttgtttctaaactattttctcctaacctgtacatgaaaaggagatgtacttttctactgtcttttagctacaagcgatatattccagaaacattgaataagtccatcagacagaggaaccttctcaccaggatgcggataaataatgttttcaaggatttcctaaaggaatttaacaacaagaccatttgtgacagcagcgtgtccacgcatgacctgaaggtgaaatacttggctaccttggaaactttgacaaaacattacggtgctgaaatatttgagacttccatgttactgatttcatcagaaaatgagatgaattggtttcattcgaatgacggtggaaacgttctctactacgaagtgatggtgactgggaatcttggaatccagtggaggcataaaccaaatgtaagtggctgttggcagtcgatcaaagagaacattcccgtgtcacatagcgtatgctgtttatccttctggagtcatctgtctgcatgtccatcactcccataggctgagtttatttaggagaccatgtatcattcatattttatttcatccctgtagcacaaggtctaaataagtatttattgagttatgtagagaaatataacaacatgtataatacgtagtagtataataataatagcagatagttcctgagtgtttaccatgtgccaagtacttttctaagtattttataagtattaactcatttatttctaaaaataaaaaaacctttgagggaagtattgctattatctccattttacggatgaatacaaagaggcacagagaagttaagaaatttgcccaaggtcataactaataagcatttgtgccaagaattgaacttaggcctctggctccgtgaaattgactaattgattttgctttatgggagcttctttatgagatatttattggatgaagaaatagagcagagtggcttaagagcatgggttttagacccacgtcgacggggttcagatcctagcttcatgacttatatggccttaggagagttatttcacctttatcagcagctaaaaattactcatctgttaaatggaggtacctactgtctaactcataaggttgtgaagaaactaaacggcatttagcacaaagcctggcaatacaataaatgttgaataaattattatagccgttacaattattattactgtaattaataatattaaagtaaatgtgggtgggtgcagtggctcacacctgtaaccccagcactttgggaggctgaggcaggcagatcacttgagccgaggagtttgagcctagcctgggcaacatggtgaaaccctatctttacaaaatataccaaaattagcaggatgtggtggcacgtgcctgtggtcctagctacttgggaggctgagttgggaggatcgcctgagcctgggaggtcaaggctacagtgagccatgaccttgccactgtgctccagcctgggtgacagcaagacactgtctcaaaaaattaaataaatgaataaaatatgagactcattttctcctcctgttttattctcatgctaaaacaataatgcttgatacttactgagggttttctgtataataggtattatactatgttagttagcacttgtctaatctcagagaaccctgtgaagatgtaagctatttcatgaataaggaaaatgaggctcaaagagatgatgtaactagttaagtaattggcagaggcaggaacttaacctagatctctggtctccagggctcatgcgacacaaaatattttcacttgtgcagatatatattattcagtgtgtagattatttcaagcatgaaattcgtgtcttctctggaaaatcccgacttgagtactgttacaaagtcaagacgattggtgataggagaaagctcatgttcagctcagtggtaactgggaagagtatgttatctgtttgtgtcagagcatgtgtagtagtctggaagtgaggagacctgaatgtagatgcatgtctagtgagcagtgatttccctttctgagtttccgtgcacattgcgtattatatagtttagacagtgtgctcattaaggtctcttccagatatgaaagcccaggattccctgatacaacccagttctttggtcctaaccctgcaggtgccaactcccccaatcctgcaagtccagaagagctggctttctcttccttggacctaggccctgcataggtttcccagcagcactgaccttttaccaatagaaaatgaagaaagcaacttaaccctgtcccttttatgtatcttatcaggttgtttctgttgaaaaggaaaaaaataaactgaagcggaaaaaactggaaaataaacacaagaaggatgaggagaaaaacaagatccgggaagagtggaacaatttttcttacttccctgaaatcactcacattgtaataaaggagtctgtggtcagcattaacaagcaggacaacaagaaaatggtaagtttgtcccagaagctcttaagtctggatctggtgatgagagggagaattgctgagttccgttctgcagcacatgattttcagagttcctgtcctaaagagaaaacaggattttcttattgaagccaaaaagttcctattaccaaggcattctcagtgttttaaagttacaccgatacattccagtgcctttctttggtctcagaaatgtgaatctgccttaggatttgcttccctcccaaatacacctcagcatcaatatttaattcacaaagctagtggatttgaaggaaaagaaaaccagcgaatgtcagtgtttcctcccaagggttctggcacggcctctctgctgagctgaagtgcaaagcaggaagccccacgttgccctcaggcgagcctcggccacagtggcagtcatcgatatggtgtcaggcacaccccagtgactctcggacagaggaaagggtgtttaatctcacttcctcttttttggtatcacttgaggacataatctaaacaagcaggaagtgggaactctgccaaaataaacctgtttgtgtcaggggaagtcacagccaacaacatgcagagagagcggctggtgagacagctagcactcttaaggtgagtggagccaacaccaggaaaggccacattctgccaaaatgtggcagatactgtgtcacaatgataacgctcagtgctgaggaagagcctggtgatacggtttagggcagacagtcactctcttgtattcagaataacttgtctttctgatataaccttttggaaaacagtttggtaacctgttaaaagccttgaaaatatttatatatccctctgttcaggaatctagagaatgaatctatcttccagaaacaatgtgagaggcaggttatggtttatgaataagaatattcattccagtagtaattaaagtgtcaaaattctgaaaataacttaaatatacaataataggagaataggaaaataaatcacaatttgcctgagaagcagaatattagaaaatcaggttgctgaattttttaatgacctggaaaaaaggtcaggggaaaaagcaggatataaaactttacctatagaatgggaccagttttgttcaaaatatcaataggtatgcatgtatatacacatgctcttagaaaaataaatattaacagctacttatttatggtggcattatgagtggttttaattttcttattctcccctccttttttttaaacaaaaaacttacattaattttattagaaaaatatagtaaaaacaaagtgaagggggagaagtagaagagctcagatggatgttaatggaaagatgcgaaatggagggagaaaagaagaaatgctgttgatggagcacatcctggatatcaggccccgtgttatatgctgcatcctggatattaggccccgtgtcatatgctgcatcctggatattaggccccgtgttatatgctgcatcctggatattaggccccgtgtcatatgctgcatcctggattttaggccccgtgtcatatgctgcatcctggatattaggccccctgtcatatgctgcatcctggatattaggccccgtgtcatatgctgcatcctggatattaggccccgtgttatatgctgcatcctgggtattaggccccgtgttatatgctgcatcgtgggtattaggccctgtgttatatgctgcatcctgggtattaggccccctgttatatgctgcatcctggatattaggccccgtgtcacatgctgcatcctggatattaggccccgtgttatatgctgtgcctgtatcttggtctgtcttagtccttgtaagaaccttaggggactgagcatcagctctacttgaaatgaggaatctgagactaatcaagaggcatgggatcttgcacagggtcactcagtgagaaagtggcaggcacttgcccagctctgtctggttcctgcctgtgcattttgcctgtgttgctttggcttctaaggcgttatcatcccccagagaccccgaagggagtgagggagaggctgacatgtccatgatctggctcttcaacgtggtgtatgcctggtgcacattttatgagcctgccccatcctgtcctgtcctggttgacacagtcaagtctagcaccaacacaagttggtgcacccatcatctaagtcagagctcaccctggccacatgggccaatgactctatgccaagccacagtgctgtggagggagcaggaggagggcaggaagaaagaaatacttgattcctccattagtttgtttttctttaccacgctagcccttactgtgtgtcaggtacttcctattctgagcacttcacaaataccacctattttaattttcatgtcaaccctatgggtgagtatgataaggggaaactgaggcacgaagaggttaagtaacctgtccaaggtcacagagctgttaggttaaagcatttgaaattgccaatatttgaccattttgacctataaaaatgatgattccatatgcataaccctactagcaggtggagaggctgcgatttgaacccagagcagctggctctagagcctgagctgagggttgaccactgctccatgctgccagtttagaatctcatgccctcgttgtcccctcccagccatgggattcccaagccctttaatcaggcagtgctttgaagaaaccctgataccagcatgttgtcaagtcagaccttcatgtatcacttctctctacatctccttggcatccctcatttctgtttagactcctgttctcaggaaatgtaagtgcagatgtggtcttacttatcatgtggctgggtgaggggctgcccaggccagcctgccccttgttcagagcatcttgaatttgctcttcagggatatccgcaggtgggtgcctggtcacacccgcaaggcagtgtgctcagtgtggtttcttttttctgaagtgccattcctatggtgaccctgccctctccaggcctccttcctcatagccccaggcatgcttccttcggcattacagctgcactaggcccctgacctccctcctgccgagtggcttgtctcccctgctcctttttcccttcactgtcctctcatttctgccacctgcctctcctttctacagggctatgaaagagtcattttgcccttttttgaagcctcagatgctttttaatgtttttttgtgagtcaaagctccaaatcatggcttttgcataccttcccttgccaggaaatgttcttgattgacctgatagttcctgtcaaatgggcagtctcttcagggatcaatgatcaggacaaaagtaccccaaatctacaacacaggtgtctttcagaacaccttccttgatggaaatcccctccctcctcttctccacaggtgcctttgcctcttcccactctgagtaagacactctgctctctccaactctcagagctccctaggcttaatctagcaaactcttcactgggcctgggattattcctagattaaaatccgggagtttcaccttctagagcaagtctgctatgagatgaaccacactgcctctgtttcttttctcctaagcaggaataatgccgatttagccattcaccgttgagtgccaagatcacggtgcatgctttgccccttcccacctccacttttgtgcctctgccaccttgattcaggcttcctcttctcccatctggacccaggggacagcttctctgcatgtctccctgcctgccacagcctcccccaccgcgtcacccccaacacacacacacatacacacacacacacacacacacacacacacacacacacggacccaggggacagcttctctgcatgtctccctgcctgccacagcctcccccaccgcgtcacccccaacacacacacacacacacacacacacacacacacacagagtcatctgatagtttgagataatagatgggaaaatgtgttgaacagtgaaagtcctatataaatgcaagggggatcgggcacagtggctcacggctgtaatcccagcactttgggaggccaaggtgggagatcactcgaggtcaggagttcaagaccagcctggccaacatggtgaaaccccgtatctactaaaaatacaaaaattagccaggtgtgatggcaggtgcctgtaatcccagctacttgggaggctgaggcagaagaatcgcttggacccaggaggcggaggttgcagtgagccgagatctcaccactgcactccagcctgggcgacagagtgaaactccatctcaaataaataaataaataaataaataaataaataaataaataaataaataaatgcatgcaaggggtatatttagtattgatgaaaaggttttccctttggggttcccattgggttataaaaatcttctcactgtgcacctccctacagagtcagccacttaagctgatagagacatgatgtaaccatgggaatttcttctctctcaacaggaactgaagctctcttcccacgaggaggccttgtcctttgtgtccctggtagatggctacttccggctcacagcagatgcccatcattacctctgcaccgacgtggcccccccgttgatcgtccacaacatacagaatggctgtcatggtccaatctggttggtcctagaaccttatcagttgcctttggtgtgcagagagcccgtgttttagtgatggggcatgtcatcattgtttaggtcaggccagttgaccatgctgcctggtacttgttggctgtcctcctttcctccctgctgtccaagctctggtcaggccttcctgtaatctcctaccatcctctttgcagcagcccctcaatgctgcttctttacttggatctctcttcatagtttaaccccctcacctctccatagctgatcaagaagtactacactttctgatttcttgctgtgtcaaacaatgtgggcaattcaagaaacactgaacacagctgagcgtgctgccatgtgcctgtagtttcagctccttgagaggctgaggtgggaggatcacttgagcccaggagttcaattctagcctgggcaacatagcaatatcccatctctaaaatatataaaagaagaaaaagaaagatcagatgatgatctcagcatcagacagtgtaataaatggaattgtcagtcagcttgtcccaaggtgccaggtgaacagtggggaccgtgagggtaatacagccttaaggccagaaggggctgtgtgggatgccttgtcccacctgcatctcagaactggcagcctgtgctgaagtacctctggtgatgggcaatgtgtgaggcagcccatggattggagctctgactgtgagagatgtgcatacctttctgatatggagctgtagttggcttctctgtaacttctgcctactcacttgaattctgccttttgagacaacagggattcttttgactttctcttacatatgacagcccttcaggcaaaggaaaacagccagctgctgtgtttcttctgagcctctcttttcagaccacagaatatctggggaagcatctcttctgccacctttcacatgatgtgcttctcaccttcttccctcttccggctgccttgtggacaggtagcttagtagtcacatggccctggccttgagaggctcacagactcatagggaaacagacacacaaagaatggcagagcaaggggttgagcatttgaaaagcgtcttctgccaatgtcccagccatggttgtgcttcagggcccaggcactcgctcttcccttggcccagaatgcccttcctccagaatctgcacagcctccacttccttcaggtgctagtcagatatcaccttatccgtgaagtcttccttgaccaccttatatacaatcatacctctttcccttctccatcccatacatgttggccactgcactctaccttattttccttcagtggcagttgttacctcctgagatactatgtttatttacataacataacatttgttcctggtctgactaccctcacctcccagaatatgagcttcccaaaggctggggctgcattgctcactgctttcttagcacacacagggtctgacacattgtaggccctcagtgagtatttgttgaatgaatggatatttcatgtttgatgggatgctgacattccttgcctaaagagcctgctcagagtaggtggcattcaaatctgattaaaccaaagaatcaatgatggcttgccaggccttaaagcacggaaagggtacctagatgagaggtcagcacatgcaaaggcatggcgcagttagaaagtacacaatgtccctgtctctctaaaacacacgaaccatggcggccctctctcaccagcacttagcaagcagcactcacctcatgcagggatgtattcagtcagtattcactgctctctacatgccaggactcactggtcctggggatacaaagaaatgtaagacaggcctgttcctactaacatctgtccagtcctcactgatgtattctctcagtgtgagcccatggtgatacaacaataaacaacatggcctccagttcccacccccatgaggtttgtgcttccactgggctggctaggggtggaggggaggcgtggcagatgctcatcaccagcctccagagaggctcttctgtcttgagctggagatgatgtctgtagggaatgcggggacaagcagggctcattgccttgggcaggagtctgagtcctcttctcaaccttggagactccatcggtcctgaggccactcggtatttccgctacgctcatggatggcatcagaggggactttaggatcccaggcagggcagatagtgtgatggggctgttaagacttgaggcagctcaggagagtggatagcccagaggttcaaagtcctgtttggtgtgagctctttctccctttgcctacttctccctctagtacagaatacgccatcaataaattgcggcaagaaggaagcgaggaggggatgtacgtgctgaggtggagctgcaccgactttgacaacatcctcatgaccgtcacctgctttgagaagtctgaggtcagtcaggacactggcttggaccaggccatacagccatgaggtgtccagtgtagcctggttcaggagctgctgcagacagaaccacccttggcagggtggaactgaaaagcctgggtctctgagaagatccctgggaggtcaggcaagggcccctgctctcaaaaggagactgctccccagtagccagacccctgcatcctccccctgtagggcccttcttccttcatgggacccatggtgggggtccaccatggctctggaagacagaacatgaccagaaaaccaattcacacccaacacttggaaagtatagtgtcattatttagagtggtttatttagactcagtgccaccatcatctcagacccagagctatgcctgtctacagcattcactggtacaaaccagcgcccaaatgccacttcatccacatggcctaacacagttttttccaaatggtagcttcagacactttaacaaattgccaccccatcttagaacaatgaatagagatgtcttttagtgattgaagcgtagctgaagctggggatgatgtgagatacattctgagggctaagatattcaccagaattactgactttgcctcactagaccacaaatgcctttgttattcatgtaattaaaaaaactacaaagtggaatattttcaaagacagtgagttttacaaaacactttacatcagtacactttaatcagtactggttaggctccacatgcatggggagacctgggacacggaggggcctttggcacggagggtagacgcaggaaggacaagcttattggcgaacccctggggctggactcagtcaagagtgggaggaggaaacggcagaaggaaccagcgctgccaagtgtcctgggtgatgcaatgcaggaacaccaccacctgcccaggctcttgctgaacagctgggcctcggggctccgtggctcagagcctgtcaggttcattgccttcccagaatgcttgccgtctattcatcagtcattggaggaagtttaatgtgtttacgatggaggggtgcatgagacagcccagcctcctcctgaagtggaattggcctgtgcagtaccaagagtgtccgtgactccctaacaatgtcacatcacccggggaaaacagcagtcatagaaatgattacttccaccgcacactgtggcccaccagaccctgtgccaagcgttgtacctacttgtgcttttttaagccttgtaatagccatattaggtaggtgatattatcccattgtacagatgaagtaactgagattttgaatatcatctcctagtttacagcttatgtaagtctttctggccctcattgtttaccactaaaatagtttagtttgtacaaaaagagcccatgagggaaaactgcttatacctcctatctggcaccacagtgtcccaaacctgggtcagacactgaacaccagctcccagtgtggttttcctcaagtggagacatggcctggaagggctcagtttgaggctgttccttgagaagttgtgccatcataattattacctcatatataatatctgctggactttataaagggcttactaagtttttcaatacaccatgttagataattgtagcaacaatcctatgaggttggattttcatgaactttatcttacaggtgaaaaaccaagtgacgcttttgtagaaatagctactgtgtctgctgtagtattaactcccttttatcaatgccttctcctggaccttgttttattatttagttagttgttggttggattatttattgataataaactttatttttgaataattttagatttacagaaatgttacagagatggtgcaaaattactcttcatgcagcttcccctaatgttaatatcttacatacccatgcctgaccccattttaaacatgtaatttctggtcatttcccgaatagcaggtgcagggtgcccagaagcagttcaagaactttcagatcgaggtgcagaagggccgctacagtctgcacggttcggaccgcagcttccccagcttgggagacctcatgagccacctcaagaagcagatcctgcgcacggataacatcagcttcatgctaaaacgctgctgccagcccaagccccgaggttcgtctccctgtgccagagccaggctgtatcccatcagtaatgtgctgagacccagatcgaccaaaacacgctgactgacttaaacaaagtggaccctccccacagtttctaggtgttttttattgagtttaattacacttctgtgcccaactcacatccaatcccttgagtgtgagcattttctgtagaagaggcatatacctttctcagcatctcattaggctgcagaaagaggcatgctcagcattagtaagcagaaaatcacttctttcttccttaagataaaatgccttgaggagtctcctgtcactggtttatttatctgagagatattcctggcacatcttttgtgggccaagaactatatcagatgcaaagaatcagaaatgcataaggtccagtccctgctctctgggggtttcccagcctaatgctgatgttacaggtaaatgaggccactgcagtttgtgatgggtgttttaactaacatagatatcataccctggagtcaaacagaaagggatggtcaaaatccctgagttccgtggcacagggggctgcctggaggaggcagctcttgaactgagtgtgggaggatgagtgggaggttgccagtgcggtcagggcatctcggcacgtgcaaacagaggcatgggcgggggctgccatgaaggtgaaggtggaaggaaggtgaaggtggaagggaggggcaggtgaggctgagcttagggtgtgggggccttgagtgctatgccatggagctgggtctttatcctgcaggctgtaggggccagggaggatcagggagtgaaatggatccaagggggagccactcagctgtttcttgttaagcctcttgaatggcgtcactgatgttctgcaggtggatttgtctcttagaatgtgaggactggaaagacacgtagaggtcacacagtcaactgtctcattttatagatgagaaaattgaggcccagaagagcgaagtgggtctcatcaaaggtcagcgtcaaagaggggcttgagtgccaggcctaacctgagtgccctagctcttgagaacggtttattttgctgctcctcacctcaagatgctgcccttcatgcgtcaggttcttcccttagaaggaggaaggcctcaaagaaggagcagcacgattgccactgaggccccatgagtgtcagaggaagaccctctgaggagtctttatctgggacacatcttgttcttccaagcgaacgtgtccataaaccctcacaccaccaggagtgggcagaggaagcagcaccaggatagaaagggacctgggttcttgatgtttgaatcagtttttggtctcagcaaggggcttgtcactgaacttggtgaaagaggagggacttgtgttcttgatcagataggggttcctgccaggctcagagaataactgcagcctttgttttcatgcttgaggattttccgcaaaggtaaaaacacatctgccacttggctgtgagacctcagagtaagttcaaaccttaaagcccaacagccctatttattcacagcaacacactggaacgaaccccagttgaggctcctgaaactcagtgctgaatgtgtttcctgttgcctttcccacctgactgtgaactcttaagacaggacctgagtctcactcaccactctatgggctcgtggggaggacagtgcccagcacggagtcagcgtgaataatgcctgtcaagtgaaccaggtagcaggagctgctggatggtgggtgcctactgtggcccagtcagtttatgtacctacctcatttatttcatctacacagtagctttttgtagatattacaaaggtgatgaaattgagacttgagatggtaagtgacttgctcaaggccatgtagctagtagtatcggtagtaggtagaacagtagtaataattaataagaacggctgctatcatgtgagcagggcttacagtttgccaggcgttgtttggagatctttcatgttttaagtcatttagtcctcaaaataacccagaatatgttgttatcccaattatacatgcccaagatcacttaggtagaggatgagtggggatttgaactcacgttgtctgactccaagtccagtgattccttctgtaccactgcccccaccctgcccaggtcacactgtctttggaaaggtgcagccatcagcctaggactttagagcaggcaccaattctcctgaccttgggagagtaagaataaggcctgtgtgtgaggcctccttacataggtcccccaaagctctctctcttccctttgccatgtgcaaattagagaagtggggaaatcgtgaaaattagacatgagaatattgtgttgggttcttcagctcctctgctctcctaaccacggggttttgatagccagaccctgatctgggtttctcacttgaaaatgcaactaagaaactcttcatgggataaataaaaagcaaagtgaaaaagcaggaggccattcagagtgggcgtgacggctcagcaggtcccacatctctagtcctgtgtcctgtgtccagctccactacccatctcccactccagaaccctgatgatacaggaaggatgatgacagtgactaagatgtaatgccagtcataatcacggcggcaaccagtcagggagcgttttactacataccgggcactgaaggcagccgttcccttgcgtcatcccattcttccacacggtaacctatgaaggacacaactgtggcccccatttttctagtgaggaaacaccttcatggaggcactgtggcttcccccattcacattgttaaccctggtgccatgttccctgaagtgcccatgcaaagaatagtccataaatggcttcggttccatccgcctctcatttcccaagtggctctgctgcctggcctcttgcctgtggacaccagccacggggccccttcttgatgccttttctcctgagttgagttgagcctgagttgcctctgaatcggattttccccaggtaacagagtggagtcaggaaaatggtatggagggagcagcctctggaaaaagagtgcccaggttgtgagaacaaggggagcctctccctgagccctgtttctggcacccacatttgttctcccgattagggccaggtatgttgtgggaagggtagagacgagagcatctctgacttcagtgtgaatcctaagattacgaactgcctggccttgggccaattacttaatctctcagaatctctgttttctcatctataaaatggggataagaatactgtgtattccacaggattgtcataaggacaaaggagttaatgtgtataatgctcatagaacaccggctggcatggagaaaacagtcggaatatgtgagcttaaaaaattagaaaggaaaagaatgccctgtcctgagggatagcagggattagagacgtggccctgtgcagggacccggcgctcagcagccattgtctcccagcggtgtgtgtggtggcctccatgggttgtgcctggctgttctacagatgttcttttaggaacttccttctgttacagtccaggaatcaggactggaatggctacattttctcccctaacttgttattgtcttctagtgcaggaaagaggaagtgaagggaaatgcatgttcgttgtcattttgctaatattcctgcttcagttaataaaattgatgaaaacatacaagtcttcagagattcccagaatactttccctgctagtcagaatctggaaggtcctttcttgccttatgataacctcgttccttgcagtagctccatagcgggaaaggtgatttctatggattgtagatttcctggcctcgaggattttgtaatgtgttgggtttgctgtttgaatcagtagaatctgggggatagtctacttaaacctgcatattgagggggcatttggtaagcgcctctccatgtcaggcactgctggtaccacgagcttcagacagggcactgttatgggtctcctgccctgatcttctggctcaaaaccagcgtttgttcacctcctcctctggttcccatcatgccctgggcccgggtactgcttcttccttccatagctctcatcctttagaaagacgccagtcattcattcactcatttaacaaataataattgagtgcctactatgtaccgggctgtggaggtggagaagaaaataagatagacagtctctgacttctttcagtttccagtcttacattttaaattttaatttcattagggaaactgtttctgacctttcttaccagaacagatcttgccatgccaaccttggagcaccacacacctgttctttagaggagctgaacaaattgtagctttccatttaattgtttatttgggagttttggctctgtcgttaccctctgagctcctggagggtaggagccatatgcctattgaataagcacttgtcgaatgactgaagcagcaagcgcccgcacaccggtcccatggccccggctcagcagacgttggctgtctgagagctcggatcttgggtgctgtgctcagactcccccaatctcttccacagaaatctccaacctgctggtggctactaagaaagcccaggagtggcagcccgtctaccccatgagccagctgagtttcgatcggatcctcaagaaggatctggtgcaggtgagtcacggctgcagggtgtgggccagctgtggtcctgcctccccacgatggagcagcttggggatctgggggaaggaaggctgtgtttggggaaatcttagtagaaaaagaacagggagactttcctttgatggcaaaagccgtacaaccattgcctccatcctcttcacccttgctgatgctcctcagagacatgttttgaggtaagtggtttggtcaggctttgtggggttacctagaacagcagggaccttctgtggtgagctgaaggggtggcagggcaggaggtggctctccacaggggagcatggccatcacacctcgctgcctgcagcaggctgtgtgatggagcacctccagagttcagtcctgcactttctgatgatgcttccagaaggagcagagctcaggaggagagaacacagggagggaacaagaggacatgcacactctgggcctgaaggagaactatcttgagaaacagatcccagtctttggaggcctttttgcccagaatctacaggctgagcggggagcccaggatctccccaggggctgccctggagctgttgctggtggtgtgaggcccagggaaagcccactttctgttctgccgccgctccccagccctgttgcatagggccacgcgttggggtatcagggagatggtgcggcagccttggagagaagcaagcacggggccactcaccacctcgggagatggcagcgccttggaggtgttggagggtgaggcggaagctgcctgctgtgaaggagcctggggagagtggcactcgggggtttgttactttacctttttcagtgagtccccgagattgttggatggggcttgagggagtggaaatccacagctaaactgcctcacttccctcgtggtacatttcttcaccaaaggcccatcattgttctctattcctctcgtggtgtgagagctgtgtcctgagattacagtcaccagagccacagtttcatagcctcttttctgtgtagaacttgacatagtctgtggggcctgcctcttttcccttgcctcgagcctccaagcaggtaaccaccatcctccatgccttccacatccacttagccaacagagatcaagcattacacgtgcgaggcacgattgctgcttcagcaggctcctgtctattttgagggggtaatcacattagcaagagtcaagttccaaagtagggaagtacagcaggatgtggacctaatcttgagaggacggagatagcttcctgggggaagcggtatcaaagcagagtcccagaccaggcacagcggctcacacagtggctcacacctgtcgtcccagcgctttgagaggccaaggcgggaggatcgcttgagcctaggagttcaagaccagcctgggcaacacaatgagatcccatctctactaaaaatacaaatgaaaaaatgagctgcgtgtagtggtaagcagctgtagtcccagctactcaggaggctgagttggaaggattgcataaggccaggagtttgaggttgcagtgagctatgattgtgctgctgcactcccgccaggtgttagagcgagaccctgtctggggaaaaaaaaaaatcagggtctcctcctggaggatgaactcaagtagctaggcaaggtggagggaacagcatcagaggaggatgaagtgggccatatgggcctttgtgggtccctgcagaatcctgacagcatggtgtcatgacttggccacgggaagagcaattattctgaaagcatatggcttttacgggatgttctgggaatacagcttcccataaccttgatggatcacttcatgacagatgcagctttaatgaatagccaaagaccttgccaggatacagcagacagggtggatgcatcgccattcggctctgacagataacaaatggtggcatttgtgcaaattaatatacctgattaacaatggtgtatgttcctatgggggataagactgattccctaggtatcagcgacagtcccttttctgcatttccagggggtcctcaaataatagaataatggatcttcagtttacaagttttgtggtgctaatgtcaacaacttgacattgcctaagtttcgtgaatcccatttcgatttccaaatattaagaattttaaaagcagaattattgcaacttgaactggaagggtcctcagaaatagatcatggtatggctagggctttgcacggatcatctcattcagtcctcctgccactcatctgggggtattgttccctttcacatgtcaggaaatccaggacacatcaccccaggctccaccttcatcttcacattgccatctcctctgtgaggttgccagggcaaatgcaggtgtactttgcaccactaattttaaatcctaacgtgcatgcacacacatgagcacacacactggataaatggatgggaaacagatggttccagtgtgagaaactgtgcctacctgtgccagagggcttcagataacacatggatccaccagatgggtttctacgcacccccccgtgtgcctgagtctgtaccaggagcctccatccctgtttcctggtttgattcttaccacagccctatgaggtcagtaccattattacctccatttgcagaaagtgggcagagattgcccccatgtcacatggccagcgggtagtagagctgggatttgcaagcctcttcacagggtagcacagcctgtgagtagaggagctgcctgggggctcctctcttgagtcttctctggaggcctggggtgggacccatgtggctggctgttgatggccctgtttgcagtgtcctgacatgttaggactgtgttttggccaaaggctgttcctaggggtagaaagcaaggagccgtttagggagtaggaggactgtctcctggggcccagcaaatgtcaccactgtgtttggccaaatagcttgttgttttctctggaggcctggggaccacgagctggggcagggagccctcttgcctttgccccatcccattgatagtccatgttcccattgaggacccattcccagacggtccatcacttcagggcacagagaggtcacccagccttctgcttcttccctcagggcgagcaccttgggagaggcacgagaacacacatctattctgggaccctgatggattacaaggatgacgaaggaacttctgaagagaagaagataaaagtgatcctcaaagtcttagaccccagccacagggatatttccctggcaagtgtcttcctctgaactcctcccctcccctctcccgtttctggagccagtggaacacaatgggttgagaagaacccttgcccttcttgtggcccagtggttttcaaacttgccttttactcagaatttttttctccacatatgatcttagtggaccctgcatgtagagtaagtgaggtgggttgaacagctcctcacactcagcctgtgccctcccttccacccccaacccccacctttcctaaggacaggtccaggtggccgtgctgtggagccctaggactctggccaaatggttcaaagttcctgatacagtccatggctctcaccacacagtctggaaaacgaaagcccagaggagtaaaaggactcacccaggattctacagactattagagtgacacagtcaaatcttgagcagagatcggctgccttcatttcccctttgttccagcatagtgctaaatatgggtatttcccagagctgaaaggaagagagagaggtgggcatgagtatccagtgggaaaattcttagccagcttctcccaccagccctgctctgcatcctgttaggttttctaaataaacctcacatccctgccaggttggcccagagaacaaggcttggcagtgcctctggacagccaaggccagaggattgatgttcagggcctggggtggcgacagtggtgagctttcctgggtccactggctttcccctcaacagagcccctggggagcagccccctggaggctggcctgagacattcctatgtcctgctcgcccacaggccttcttcgaggcagccagcatgatgagacaggtctcccacaaacacatcgtgtacctctatggcgtctgtgtccgcgacgtggagagtaagtgtgttctctttcaaaggggtgggtggcctggctggggagcttgggtgctgtggagatggtggaggctcttcccaccctcacgttgcccaggcttcttgcctttctttttgcagttgaggagattgagggactgagcaggtcatttgcttaagttaatagtggaggtggaactaaaaccaattgcttttcattcatttgtgtaatgttttcttgtcaacgctggccaagaaccctacactgtgctagacctgggaggctgaggtgagtgaaatgaggtcaaggccacaagagtcaggcccaaggagctctgggcaggtgagcgaggtgagcgcaccccacaagcagcaagacgctggctcctcgaatggactggcttccattttaaccacaggcaggcttggccctttcttggttgtcaagccactgagccggtgggcccttgggctgctgctgcacactgagatggaggggtggccttggcctctgagttcctgacatgtaagtttggaagaagagcgattttttttttaaccccaagtgacttcttccctgtggaatccaacaatgtgagctgttccgtgtactcacacaggagtcctgttgagagggaagttttgccgtgtgagcggcctgacctctgcatcacagtgtgttgtagaacagcagcagtggtggcggttgttcccagagcccttgttctctgtgtcaggccctccgccaaggctttccaggccttgtgacatttagccgccatctgttattacagatgagggaattgaggctcagagaagtgtcacttgctcagtgccaccgtttagaagaagagcttggggttgaacttggcctttccagctctgaagcccctgcaccattgcaccccccaaggatatctgtgtactctgaggccgagtagtgtccactgaagtggactgtcgtaaggggatgaaggagaggaccgtgccacagaccaggttccagacatggctatttttatgcctacagatatcatggtggaagagtttgtggaagggggtcctctggatctcttcatgcaccggaaaagcgatgtccttaccacaccatggaaattcaaagttgccaaacagctggccagtgccctgagctacttggtgagaatgtcctgatgtccataatggtcccaccagaaaccagagtgtcctgggaggggtggcaggaaggaggtgctagccaagcagctagaggggcctgtccttgggttccatggggccagggctctgtggttgaacaaaggtgtgcctggtgcttactgaagatggtcgtttggggccgttccctgtgctcacatgagttctgtttagtgggaaatgttagcacgtcagagggccgacttgcatactgcagcatatggatggcaaggctgaaagcagtgcagtacgtgttgagtgaatgagtgaactgccagcatctagtagctgacgtgtggagtgctcaccatgggtcagctgttcaggcgtttcacagattctaatcagtatcatgctcacgaagcccaatgagatacgtgccactatttagccacattcagtgatgagggagctggagccaaggggcacctgtgatgtgcctaagtcacacagatgattggcagcagggccaggctgtccagatctggctgtagctgggggtaggaagagatgacctgagggaccagggttggaaatagaatgcgggaaggagcagcttggctaaacttgacctttttactctgcaggaggataaagacctggtccatggaaatgtgtgtactaaaaacctcctcctggcccgtgagggcatcgacagtgagtgtggcccattcatcaagctcagtgaccccggcatccccattacggtgctgtctaggcaaggtgtgtctcccctctcttccctctggccccaccccgagtcaggggcaagtcagcagagagaagggctgggctggggttggtctccttttagagagtcattttttttttgtattttagtagagacggggtttcaccatgttggccaggatggtcttctcttaagtccttgaacgagcccccgttcgtcctcctgccctgggtgatggcccccaccctgggatgttttgctgatcctaaggccagggcttcagaagcctggcttcacacgaccctcctggggagcttggaggcagggacccatctgctggctgtgacccagactgatgtatcagaagtgctggtggtggcttggagggctgcacgcctgcaggccccccgcacagggcctatgtggccatgggccatgtttgggcacactgcttgaagtagttccttcattggctcactgttctggctgcagtgacagtaattgaatccctaggagatcccagaaactgctccatcagtgtgtctgttgtcttccagaatgcattgaacgaatcccatggattgctcctgagtgtgttgaggactccaagaacctgagtgtggctgctgacaagtggagctttggaaccacgctctgggaaatctgctacaatggcgagatccccttgaaagacaagacgctgattgaggtgagcaggtgtttcccggggcgtgaggcaagtgagggctttcaggtgctcgtgggcttcccaggagttgtcggaagcctggcactgtgggaagagatgggcatgggtttgaatctcttcacgggcctactgggtgtgtgacctcacaaatgtaactgaacttccgtgagcctcagtttcatcatctataaaatggggataatcagtaactacttgtagggttgttgtgaagattaaataatgcatatagagtgacaggcatgcagtacaagctcgatagatgttatagtattatttatctgagattttaagtgcctgttattcagcattaccacacaaatacatatggagttcctattgtgtatcaagcatcaagcttgggaaaagctggaggttcactataaaataagatacaggccttgccttcccttgagggccttagggtatggtagggagttaggctaaaataacaacggtaagaattccagaaagaatacctgaaagtgtcaccctaagagccctgcaaattaggtaggatggtgtcattaccctcatttgacagatcaggtaactgagactcaggtagccccacttacctgggttcctcagctagaatgcaaaacaggcgaggtgtggacctcctccaaatctacctgtggaaaaagtggagactctaactccaaaggggtaaagtagtaaaaatcacaatgaaagaccattgtcccttcatctcagtgactgcaattggaatgtgctcctgttgtttagagggggcaggcatcagtttcggctgtgagagcctggtttcagtgctgtgtcgggagcctgggtagtttggtgtgcctggccttgagtgtctggagtggggaaaggaataacagtgatcaggtgggaaaggccatttgggttcagatttttaaagtccctgattccaggctgcagaacctacattttactgggggtggcatgggacaaggaaggatttgggtggaggagggaggggcttggaggtcggccttgggatgttcttctggatgcagtagctgggatggacagaggagagacctggagggagacaggggccccgagtctctcagcaatgggagccccatgtccggaaatggcagcggaagtccagagtgcagggtgggagatattgaagaggtagaacctttatgacttgccagttaatgatggtgcaggacttgggaaaggatcttaaacccgcagggaaaccatcagatctacagatctgctatttggaattttcagcctaggcttttgggaaattcatatttatttttaacttccttggatccttggaaatgaaacaacataccctttgtcatcagtcagtatttattgagcacgtgctgcgtaccctgggctgaacagcatacagggtggtgtaaggaaggacccgtgtctttaataaaataggggtctctctccacctaagtccccttgggttagatggcttttctgcaggctgcactgacgcagggatgtgtgagtgacactcaaggacaagagcaattctcagctccttaattccagtcctccctcctccctgtcctctggggcctgcccaccccaccccaccccagggcccacggggaccagagaggaacttagtacccttggagtccagctatgaagtagaaactggaatgcagtggtttcacttcatcttccaaaagtagcataagttcttgtttctaaaatttaaagtaataaacagttgaagaacatttttaaaatgaaactattaaaaaaagaaaatagcaatcactgcattcttgtcatccctgaccactgttaacactttggcattttgtcttccagcctgtttgtatctctcttttttaaacaaaattggggccatgctagatagagttatataaaattctgagttttttcatttaatactgagaatgctttcctgtgagattaaatcataatttttacaaatttaatgtaagagttaattgttttgtttaatttacttgactaattttatatttggcatttaagttttcaaatttccagtgttctgtctaattctgcaggaaacatccttgtacataaatatttgttcatatctgatttatttctgagtcattcagtcattgaagttaatgcatcagagggtttgaagaatctgaagatttttgtacatgttgcccaattgtattccagaaaggctgcatgcctttacttgaatgaagctttttgggactgggctatagtgcccagtctccttgaatttggactattcagtattaggactgtgatttccccttgcaagaataaggcagcagtaacaaacacttatgaaatctacctgtaagtggagatgttgagaatcgaatgaggaattggcaattccacctgacctggggctgagaagtttgtaggtggttcctttggtttcttccatgtgcccctcttgtttacagaaagagagattctatgaaagccggtgcaggccagtgacaccatcatgtaaggagctggctgacctcatgacccgctgcatgaactatgaccccaatcagaggcctttcttccgagccatcatgagagacattaataagcttgaagagcagagtaagacctgccatgtgctgctttaacccagcttggggagaaacaggagcctgggtggcaatccctggcaatcgactgcctttcactctgttttcttttctcttctgttagatccagatattgtttcagaaaaaaaaccagcaactgaagtggaccccacacattttgaaaagcgcttcctaaagaggatccgtgacttgggagaggtaagttacacccgtgctgcttgctgctgatggcagagccctccgccatccacagcgccactctctgcacgtacagctgctctccattctttttcattctggggccaggtccatgagcgaaagcaccttactgcatttgggggccactttcatcacaagggattgtgtctttctccatgtgacacacggcacggacggaatgcacgtccctgcctgcatgcacgactgtgtatgcacacgggactctgggcagctcccttgagagacttgagttttctctacaggacagaagagaatggaaagagggagagatgggggagtaggtatagatatggtggaataggaaaatccttgcctctgactttcccgggcatatatatcctgtaagcttctctctttttcttttgcccccgagagacagggtctcgctctgtgtcccaggctggagtgagtggtgtgatcatagctcactgcagcctcaacttcccaggctcaagcaatcttcctgcctcagcctcctgagtagctggaactacaggcacacgcccccatgctggctaatattttttattttttattgtagaaatggggtcttgctatgttgactaggctgctctcagactcctggcctcaagcaaggaggcctcccaaagtgctgggattataggcataagccaccatacccagccctgtaaggctctttagagcagggataggtttattgcacagaatcccaaaatagagtgtcagcgtttctttggaccttaaatgggagtttccaaacagttaattgtgactagagaagctactgagatttgtgtctttatacagattttctgtagtctggttaatgaaacagacttgatacatctccaggatctgctgtgtgccagccactgtgccaggcattgtcagaagcatggcatccttagttccccccaccgtccccgaggccagtttctgtatgcagcgagtgcatcaggagccagctccgatttggggacttggccaccactgtcgctgtcaggtggcttggctggaacctgatctcacgtcttctaaagactcctcatgcatttgctcttttcagccatgctgtggggcctgtcctgtaacgtgagcccagggcttttagagaacggcagttgtcctgcaggcccagaaataaccttcatttcctgtggtcatagaaattgggattgatgagttggttcatcgtcacctgctactttgtcttggctcagtaactgaggggacagtttgtgaggccaagagagcgagggggctgtagtgagcaagtacagtccaggtgagaggcttctgcctgcaaggccagacagcgagaacccctggccctcaggggaacggctgtgaggagcaagacttctgtgtgttccgtggcctacgatggggcttccctgataacagcacatgcatctttccctccagggccactttgggaaggttgagctctgcaggtatgaccccgaaggggacaatacaggggagcaggtggctgttaaatctctgaagcctgagagtggaggtaaccacatagctgatctgaaaaaggaaatcgagatcttaaggaacctctatcatgagaacattgtgaagtacaaaggaatctgcacagaagacggtatgttatgcaaggctggggtccggtttaaagatttggtgactgtctagggtcataaaggccagtgcaaaacaggcactccgtggccttacctgggcgtctgacatgctagctggtggttcccacacactctcaaggcttccaagtcatatgtcaaatccctcagcagctgcagggctccaggaggccacccaggcccctccatccaggggctggttccagcactgtctctccacgtcacttgcacttatgccttatgaaactgattcctactctacctccacccacttcctgttctgatccaatactagccagggtatttcattttctagttgtctaaatcaaagtggcaagtaatatttactaataattgtatcttatttgcaagccagcatctactcatggtagtgaaattgacagctgatgataatttttttttttttttttttttttttgagacggagtctcgctctgtggcccaggcgggagtgcagtggcgcaatctcggctcactgcaagctccgcctcccgggttcacgccattctcctgcctcagcctcccgagtagctgggactacaggcgcccgccatcacgcccggctaatttttttgtatttttagtagagacggggtttcaccgtgttagccaggatggtctcgatctcctgacctcgtgatccgcccgcctcggcctcccaaagtgctgggattacaagcgtgagccaccgcgcccggcccgataatttttgaaaacagtcatttgcctgtggtttacagagcactctgactgttatctcagtgagtgcttatgcctgtgaggtaggtacaccattgttaccatctccattcactgctgaggatcttgaggcataagaggtcaagtaacatgcctgtaatgaaggggcgaagctggcgtcacctcagggcctctgtctcatatcctgtgcccttgcctctcccatggttccctcatttggcagcctcagactgatggatgttttttctaaacaggaggaaatggtattaagctcatcatggaatttctgccttcgggaagccttaaggaatatcttccaaagaataagaacaaaataaacctcaaacagcagctaaaatatgccgttcagatttgtaaggtaaaaaataaagacatcatgttacagattaagacatcaggcactctgtcctgggtaattggtttgtaatttgactctaagtgggtaagtttatgataattatactgtttgtttttctctgcattatttagatgaaaagttagcttctactaagaaagtaaacggatttaaatatggttattttaatgtgtatttatttgaatcagtttgttcttaatattcttgcataaaagtcagaaccaaaaaaattgtcagtgatatgtgaatgaaatgacatttctattttttctgatgaagtgatagataatacaatctaaagtgactttagcaatgtgcttgacttttacttctctctctcaggggatggactatttgggttctcggcaatacgttcaccgggacttggcagcaagaaatgtccttgttgagagtgaacaccaagtgaaaattggagacttcggtttaaccaaagcaattgaaaccgataaggagtattacaccgtcaaggatgaccgggacagccctgtgttttggtaactgaatcaaaccactaggttttatcaatgcttcatagagtttacactgttttaataggccctttctggctatattaatgtgtctcattcctctggcctgactcaaggttagagaaggtttagaacatttggaattgattgatatttatcttcaagaaacacacctttcagcctgtttcattgaaagcagcctatataaatgactgagcttcatatgacaccgtcttccaaggaatgaaagaaatctaaccaccagctcaacattcctagctttccaggagagggcattcatctgatgcagttcttaaaactgtgagcaggtggagagaatctagttcctttcttaaacacattcctgcagagggaggctgtaggacagagtgggcattgcagattcagggaactcctggacagagcagagcaaaacctacgggagacctggctgtctcatgaatcaccagaggttcccaggttagaaggccacacactggctacaaccatgtctcagccaggaacactgtccaggggagaggctgcttacatctctaccgcaccctgccacgtaaccacataacgacataaccaatcagcactcccctaggtgcatcctacatggacacaaacatagacctctcccacttatggagcctaaacttactcattcattcatttaagaaaatgcatcaaggtcctgctttgtgccagtactggagatatggtgaacaagtaggccgagtttagagtttaacaggctaggcagccaacggcatggagcaggaaacatacagaagggttcgggcttggttttctggaagtcgtgagtattcagaagaaacctgaaagattcatgcgggtttagacagacggttgctagacagcatgcgtgactaggaagaatgagacaagagcagtcgatttcccaggaactgaacctcagtgaggtcagatcatggaataggaggtttgcaggaggaagcttgagtcatggagctgggacttcatctcaagaacaatgggatgctgctggagagtttaaggagggagactttgttttaaaaagaccaccactgaatgaagggaacaagattggagccagggagtctggagccagggagtctggagccagggagtctgatttggctgcttcaacagctcaggccagagctagtgacagcatgaattaggacagggactgggagagtgacagtagggtttgagagaagtgagtaggttcaaggagtatataaggagattgggtgcggtggaatgccttcatttttggcttgggcaagtgggtgtcattcagcaaagtaggcaatgctggaagaggattggacagcgatgccacattgtgcagtgaggccactgctgtctcatttagagcctgcaggcaaatcagacctggggctcatcattacacggccacctcctcccataccctgagagcatgttctcagtgaaatgaagagcacagacttggcgtgttattttagggcagatacgtgctaccgagagcctgtaaaggataccgtactataggtcagatgtgcaccatagcagcgtatacatggtatgtgtaaaatatataatacacagtcagatgctgtattaaattataagaaaaaccgaagaggtgatttttcagttatcctgtaatgtcggatggagtgtgcctcccaggaaatgaagttttgtgttctgcttcctttcaaggtatgctccagaatgtttaatgcaatctaaattttatattgcctctgacgtctggtcttttggagtcactctgcatgagctgctgacttactgtgattcagattctagtcccatggctgtaagtcctacttttctcttcatttgaatccagtacccatttaaaatgtgtccatccctctgcttggttaacttttgtttttaaatggaatccaatgaatgtattataatgtaaaatgtcactttcccattaacttggtttgctacttgacagttatttgtgaatctctcaagtcttgctttcacaacgagcccggagttctataggatgaccttgactctcaaggatcttatctgtgtagagatgaagggcagttttatgggaaaatgagcaagttaagtggggtagcactgggtagggaccagccttgtctgtgcctccttcattcctaaatcagatcattttcttgggaacagactccttgaccagcacaagcacaaggagtggttggtagagtctaagacactggttagagacagatcattgaaagctaataaggattttggatttttatttaaagttactaaggagaaaagcctttttattgctacttaaatttccagttgattgtagaaatttcaccttaatctgtttggcatttatgtaaatacttgcaaagttaaacgttttgtttgattttattttatatagttgttcctgaaaatgataggcccaacccatggccagatgacagtcacaagacttgtgaatacgttaaaagaaggaaaacgcctgccgtgcccacctaactgtccagatgaggtatctatgggccacgtcacagtaataacactccatttctattatgttttcgcagcttgagttgtccagcaatgggtagaggggagagcgaggaaatgatgcagtgaagtccttgtaaaatagttttctgaagctgaatttcacataagataactgagaaatcgcctttggggctagatgatagccaccagttaggttcagagcaaggattccctccaaaagccagcccctctttatccacttgcttgccccagagggacaggttttggtgtagccttagtgtgacaaatacatataattgcattttttgtgtgtaagtttatcccacttattagcatttataattcagttttctaagtgaattgagcctttaatactaaactcttgagactgtgtaagacacactgaacagtatgagtcagagagtgaggcagccagtctggaaagttcaagtctgaactgagattctgcttcaccctctaactggtttacaggaatgacctggattttattgcagccagtcaacccttgagcttctcaaatgttaaaatattatttatgaactagagttgtatcccattttctgtgttttaaactattcaaatactcttgtttttctagtctttaaggaaaagtcattgcatttccaaaattattttcttactcttgatatttctgttattttttaaagttcccagatctaacatttttactgttgttacttctttctttttacaggtttatcaacttatgaggaaatgctgggaattccaaccatccaatcggacaagctttcagaaccttattgaaggatttgaagcacttttaaaataagaagcatgaataacatttaaattccacagattatcaagtccttctcctgcaacaaatgcccaagtcattttttaaaaatttctaatgaaagaagtttgtgttctgtccaaaaagtcactgaactcatacttcagtacatatacatgtataaggcacactgtagtgcttaatatgtgtaaggacttcctctttaaatttggtaccagtaacttagtgacacataatgacaaccaaaatatttgaaagcacttaagcactcctccttgtggaaagaatataccaccatttcatctggctagttcaccatcacaactgcattaccaaaaggggatttttgaaaacgaggagttgaccaaaataatatctgaagatgattgcttttccctgctgccagctgatctgaaatgttttgctggcacattaatcatagataaagaaagattgatggacttagccctcaaatttcagtatctatacagtactagaccatgcattcttaaaatattagataccaggtagtatatattgtttctgtacaaaaatgactgtattctctcaccagtaggacttaaactttgtttctccagtggcttagctcctgttcctttgggtgatcactagcacccatttttgagaaagctggttctacatggggggatagctgtggaatagataatttgctgcatgttaattaattctcaagaactaagcctgtgccagtgctttcctaagcagtatacctttaatcagaactcattcccagaacctggatgctattacacatgcttttaagaaacgtcaatgtatatccttttataactctaccactttggggcaagctattccagcactggttttgaatgctgtatgcaaccagtctgaataccacatacgctgcactgttcttagagggtttccatacttaccaccgatctacaagggttgatccctgtttttaccatcaatcatcaccctgtggtgcaacacttgaaagacccggctagaggcactatggacttcaggatccactagacagttttcagtttgcttggaggtagctgggtaatcaaaaatgtttagtcattgattcaatgtgaacgattacggtctttatgaccaagagtctgaaaatctttttgttatgctgtttagtattcgtttgatattgttacttttcacctgttgagcccaaattcaggattggttcagtggcagcaatgaagttgccatttaaatttgttcatagcctacatcaccaaggtctctgtgtcaaacctgtggccactctatatgcactttgtttactctttatacaaataaatatactaaagactttacatgcatatgccttttaatattaagatttcattttcaaagcatttcaaacaatttgcttacatagaaaaataacagtatagttttggggggaggaaggggtgggttacggtccttactactaacaaacaaacaaacaccacttgatttgcacttcttcactgttgtgcccagtgattgataacggggcacaggccagtatggatggcatgtccactgtgctgtagtccagacacctttgtttgtttgttttagttccttcaacctcttcctgctttgactgactgactttttgcagctctgttgcaaaattcaccatctttcctttcttctgtttgtttgtttgtttgtactatagtggaggtgtgactaagcattgaagaggctgaatgcaacaggaaaatgggaaagagaagtgcagggcctgaaaaacccattagtcatctgctatatcactgaatgatgcctaattcttatcagttacttataggtagtatacttagaaattaccttaaactttctagctgtcagtcattttccaacagaagctagtatatgcaataaattagaccaagtgaaattctttacaaagcatacaacatatgtaccaattctagacttcataattaaaacaggatatccacatcatagttaaaaataacaagtccccaaagtgacgagatatttaatgatctgatttcaaaaagccccggattgagatcccaaattccctatcaattaattacagtcttataacataaacaaacttagaaatttctagatggcaaaaggtttctcatgcatttaataccaaggtcttcaagaaatggtgatgtcaaaagtcatcatagtccataaagataaaacttctttcacaagtaaattgggttaaataactgatttttcaccctaacacactatcaaaaagagagagagagaaagcagagagtgaggtatagcttattagctcaaaatggttataaatactgtgactccttaagactccatcagaaagtgcagtattgactgctttactatactatattgtggaaatagggcatttagtgatcaaaataggccccattctagtcattagatcattactagtctacgctatgaaatgagcacagaaacccatgttcctttccacttacaagtctgtctaaaggctaaaggtctgtctttaggtgaattgaaaggaatagttgctattagaattagtgctattagatcagggatcagcaaactatatataaatggccagatacttgaaattttaggccatatggtctttgtaggccatacagtctctgttgaagctaatcagttctgcccttgtagcgtaagagtgccacagacaacacgtaaatgaatgagcatggcaacgtcccaataaaagtttatttatggacactgaaatctgaatttcatataaatttcatgtcataagttttcttttttcctccaaccatttaaaaatgtaaacattagtcttagcttgcaggcagcacaaaagcgggtggtagaccaaatgtggacccagggtgtagtttgccaaacccttttattagatcaccaaagttacttttcttaaaataccttctatttttcacagaaggtataaatggtaaacaacatcttaaagcatcggtagtagtggataccttggacatcactgtcactctcttaccgggtttaattttgcatggctggtgtgggcgtaattgagtgtgcatgtagagcatctttataatattaccatcagcacatttggtacttgcacccttgtagttctaggaaaagtcctaaaaatctataaatgcaattacttctagggaaagtaaattgaaatgcacattggcttataagaaactcattcttctaaggctcaggaaacaacactgtttcccatttattgcttcaaacttcttttatatatggtgtcagaattattcccagtcctaaatcaaggaatattggaacattgttagtttctccaatggattgtaagttagcacactgattaagatgcatctgactctagtggaaaatgtcctcaattgatgtctcttcttattgctattttttatttggcatttctgcctgctgcacaacacagttccttctgggaaactataaacccgtatttaaaggatatggctagtttgaatgaagttaaggcagcgatgaacagcagagatactgcagagaaccttagggggttattaggagagagcttaactcagtatactcgcttcttttttaagtaagtttccatgtaatatgctcctgtgccctgagaatgctggtcaacacattccactgaaccaccttctggggcagagatgagatatgatgagcctcgcttttcatttcttaaagatgacacctatgagaaaataaaattgcagctagttttaaaatctaaagttggcttattcattaaagatatttataagaaaagcattccactttgacttggtgaatatagaataacaggataaatacccaaactatcaaaaaatacacaaacccctttgttaaataagacttttaaatttctgtatcaacatcgcctttggaatttctgcaagacacaaaccagtctcagcaccttcactcccaaccccaactttttgggaaaagaaaaaattagagcactgcatgcagctgcttctgctgatcacagctagttaaacccacggactcagaatatcaacaccgaatgtcagtattcctctgaaggaggagtggctaagacatcaagctgcatattgaattagatgttaagtgtgcctggtgacaagaggagtggtgagagaataaatcaataggtgtagaaactgacaaatgacatcaaagaaaacaacatgaaacattctagagagcaatgggaaactcagagctttggtctccacaataatcgcctggcgagcatattaaaatgcaggttttcaggcaccatcccagagattctgacctgaaagtgggccacatgtcctcacaagtggtcacagtgatcagcacagtaaatcagatggtgtagcactgctcagcttaatgcctcttagtttcagcttttacaaaaataagtgcagcaagcttttatcaatgcagaattatgtgacttaatatgcaagaacttagaaatgactgatgagtaaagcttccagtaacacacaggagccttctcacgttgcaattaaaactgcaattgtttttgaaccaacaacggtcacaatttttaaaagtgcagccagcctcagagggaacagatgataggtctctctcaactccttgctaaagtagttctcagtggtccatgttagagggatgacaagactgaaagaacgctgcgtcctctggtatctcatttcaaagtggcttactgtggggacagaccaatacaaagcgtcttcacacaagcccagtgtaaaggaatgtttcacagagtgaagctgatgggcaaagaatctggcttgaatttctgcctcgacatttttttcctggtagtaaagtatgtctggggtttgtgctagaatgttagaagggaagcaggtgagagggtagatgaaaggagacctgccgtaagttgatagttgtcaaagctgagttgatggtgacgaggggttcagccctagagaagggctgctgcaccaaacagcttgctcacctcttaggtggagcctctgccccaaaaacccttcctcccagtctccagcctcttggttattctctccagctgccttcttcattagggccccttcgctggtaggtgatctttctgaatgttggaccccagccactaacaccatcagaccttacttcaggtataaagaactctttttagcagctttcctcctcttagaagtcatcagtccattctacaagtgagattttccaaagactgggggagggaagcagactgctcactctgggatctgggatgctcctgctcttctcacccaccttccccaattcttcttgccatgtagttatctattctttcatgtcttggcatgcagcaaagcaacagcctgggtttctgtctttctataccatcttcactgtcagaagccagataggaaatttattacattcttttattcaaagggcttcccaatggtgctacaccattcacagtgagaaccaactgagacctatgaaatcagcaaaaaacttcactgagcagcacaggaaaatattagaacaggaaatgaaagtgggtgtcactcatcttacaataaagacaaagcctgcaaacattacgttgagtaaaataagacattcaaaaagagacagacatggtatgattacaccaatgtgagatataaaagttagtcccagttataaaaacagaaagtcaaatgatgttctcttcaggagctgaggagaagagggggaaaagtgcagtttattaattatcagattttacttttgtaaaatgaaaatctagagatctgttgcaaaataatgtaaatatactgaacattactaaactatacacttaaatatttaatagtaattttatgtttttatcacaattaaaaatttaaaccttaaaaaaaaaaaagaaaacgggtttcactgtagcccatgtgatactgggagaaaggtaattcttctgatacgccctatcaaagatatctaacttctagtgtaaggactggtgaatggggaatgatgatttaaaattttgaaagaaagctcagtgctctgggagaaataaattcctacataagaaccacaaccacaaccacaacaaaacacaaaagagggaaagaatataaagttagcaaatatttttccttctattttgtatttgtaggatctagacatccattccttcataagtggtctattgcgggcactgggcttgtgtgctatgaggtttacctggatgaatgaaacttggactatgccctcccacagctcatatcctaggaggggaaggaagaggaatgcaaaacataattctaaaaggggactgtcactttgacaaaagagaaatagaagtgaagtgctaaagctttttccagacaaggaaaatgggcggggggtggggggggtgggtttgaaaggtacaggcactggtttcatggataagatagcatctgagttaggatttggagatgaggtcagatatggacatgaggagataggtggtgacccttccaggagaaaggcagggcctgtgcaaaggcagatggcaaaaaagccaggcctgtgatggtagcagctggcaggcagaagagggcagtggcaaatgaggttgaaaaatgaagctggcctcagtcatggagggctggaacgccaggctaaggactgtaaacaggaccatacccttgatcttggaatatggcaagattaataagcagctctgtaaaaagtatggcaatgaaggagacaggcattattaagtctcaccaggaggctattgaacttgtccctattagatacatgcatgtgagcaaacacacagattatatgtgatttaagacttgatttaaaatgtagcatgaaacttacagatgagacagaacaaagtggtatatttagaaaatctgaaaacaattttgatgagcatttatgctttgaataccaaacaaaaggaagacctttagagaagctataatattctagttttacatgtctaatattcaggtggaaatcaaacacaatagtcattttagaggacttcatctttagcagggtcttttttagggttggctgaaaccactctatgaatagtttgcacccagtggttccattctgtactttggaactacaatccaagtctaatacttccttatcagaatgggcataacttcaacggaggcccctcaccctcatgcccctgggcaatcctactatatccccaccctaccctgcccactgatctccactcccctaagtgactattgcaagccttctcttttctcgaagctccaacagtacaccctcatcttcactctcagctgatgctttgctttctatttcaccaagaaaacaaaatcgaaagagaaatcttaagacgcacagtgactaacccctggtgtctttacttaccctcacttccttggtgatctcatccaatttcatgcaattcacaattatagcgatttacaggaatgcgatggttctcaaatatgtacctctagaggcccataactctcccctcacctccagacttgtataatgaacaccaataaaggaacatcttcacttagggatcttatgtctaaaacgtacccataaaacttgctccacccacacagtcttacccatctcaatcaataacaaattcatttttctaggccaaaactcttggggacttggctcctctcttaccctcgtataccccactgactccagcttccaaaaatgtctccagtccagccacatgtcactgcctctgttgcttccaggcttgtccaagtcagcatttttacttggattgtaccacagcagctccctaactgaccctgctatgttctacattcattatttaacacagcagctaggcatgttaaactataaatacagtcaattatccctctactcaaagcatcccagtggctttctatcttagagtaaaagccaaagtccttacaagggcctaaaaggtcctaaattgtctgtgccctctgcctccccgaccccactgtgacatcatctcctattctccactttgctccctcttcttctgccctaaaggttgcttgctgttcctttaacagaccaagcatgtttctgcctcagtacctttgcacttgctgttccctgtccctggaatgtactttacatagatattcatgtggcatactccctaaagttctggtctttgcccaagaatcagttttactatgaacccttccttgaccacgtatttaaactccaagacttcccagacactctttagcctccatcttattttctctgcagcgatcactattccttttactaattttttcccctaaatgtaagttccattcttataaggattttgatgttttgttcattgccatatccctagtgcctagaacagtcctgtcatatagtagacattcagtatatactggttgaatgagtaaatgaatacctttcaaaaaatattttctaagcatccattcccagctccttcagcaaatagtcatgggccatggtctctgacactctgacatggaaaaactgaacaccgtaatctactagagcctaccaaagcaaaggttaatgtgcttctcgctttgggcacctgccctctcgttagaatttcaaattagttggctcttttaaatgttgctcaccaatccaatcttttgcacacatctactatgaaacccattctctatgcagtcgctattttattcttggattttaaaaagttaattttcttttattaaagcaaatctttttattttcatgtaaatgtagactttcttttatcccattgatttccaagtgaatgtagaaacagaatgtcacaatatcatttgttgactgccagtttttaatacaatgtatcttaagctcaatttttaagctcatgtcaataattgaactggtggctagttttcaaagccatcgtaagaattggggaaaggggaatcttgactatccctcagaagattcctttgggatatgttaatgtcaacagtgaattccattaggctcatctgctatcagtccaattaaagatatttattattgttgttcttctgaaaagaatataagcatctagcaggtagccctttaaatacaaaatgaaatttgttttcagaaaattctgcctcaaggactcctcagtctcacccttaccttcagccccacttcaccttttctaagtcttgtctcttcagtggagtcaggtatacggagaaccaaaatgggactgcactagttctcctgagatctgaatcaagcccctaatgtccctttcttatagcttcaagtccagcttttagatttcagacctacagaaacatgaattaattttatcattatttctgcattaaacatttttaaatttttatttaaaaatataactttctcccattgttaaaaatgtttcaaaatcaatatgcttcattctgtgacattaatgatataataaaatgtctctgtctgatatatatacataacaaatgtttccaatgttcatattcatatttgcctctcagctacttgtctttcttcatatgaataatggttgagtcctaactttggatttaacgattcatccccaaaaaggtattgcacagcactaattttttttttttttttttttttttttgggagacagggtctcgctctgttgcccaagctggagtgcaatggcgggatctcggctcactaaagcctctgcctcccgggctcaagcgattctcctgcctcagcctcctgagtatttgggattacaagcgtgcaccaccacacccggctaattttttgtattttctgtagagacggggtttcgccctgttggccaagctggtcttgaattcttgacctcaggtgatccacccacctcagcctcccaaagtgctaggattataagcatgagccaccccgcccagccgaaatacatttcaacagcttgctttccttacttccagtttttaaccaaaatcactttttaaaagtactttccaagttattgtctagggttaatatatagataacctgtgctcccataattgttgtttaaagtaggcttatgttttaaaacatattttgtatggtaggtgtttgtcacacgattcggatctatcacggtccatacaaaaatccacacagcattcattacataacacaatgtactttttggcaagtctgtctgcattatttgaccactgggtggcagcattaggctccatatgaaaggaccaagcattcattttccaggtcttttgttcatttttctttcctcttcccctcatcacatcatctcatcatatattctgtggttgattccctggaacaggcagtcagcctcctggcaggggagatccctggaatcagggtaacacaagaacacaccgtgcaagtagataacactgctgtgctgcatgctggacaactgccacatatggcaagtgttaaatgaaaaacaaaaatcaggccgggcgcggtggcacatgcctataatcctagcactttggaagaccaaggcaggcagatcacttgaggtcaggagttcaagaccagcctggtcaatgtggtgaaaccctgtctctactaaatatacaaaaattagctgggcatggtggtgggtgcttgtaattcgagctactcgggacgctgaggcaggagaatcacttgaacccaggaggtggaggttgcagtgagctgagattgcatcactgccctccagcctggatgacagagcaagacgctgtctcaaaaaaaaaaaaaaaaaaaaaatcacaacttacacagtcatatcaaacagctgaaaaacctcttacatttttctttacattattgggactatgtcaaactggaaaggtgcttaagatatatttttacctattttaattaaaaggggaagggtgaaatgttttgtctttgactgattataattagatgttagatttaggtgtttaatagacatttaataaatgggctcaaaagcttctcttttaaggtagacttctcccaaccatttgacatagaaggacctcagaatctgaaatttcaaactcaatttgtacattcatattgacaggattacatagctgactataatgctattaataactgctagagtgtatactacaaatttttaaataatttatttctgatttaagttttcccaatcatagttcaaatattcaagacatgcagtttttgagaaaattcacagctcaatggcaattctaattaattattacaactgactagagaaatggaaggggtagtccatttaaaactgatttctaattagacctagatcttgaaaaactgatctgatctgtttgctcataactaactacttttagg

SEQ ID NO: 866 - DNA, 4880 bp, Homo sapiens
gcgcttctctgaagtagctttggaaagtagagaagaaaatccagtttgcttcttggagaacactggacagctgaataaatgcagtatctaaatataaaagaggactgcaatgccatggctttctgtgctaaaatgaggagctccaagaagactgaggtgaacctggaggcccctgagccaggggtggaagtgatcttctatctgtcggacagggagcccctccggctgggcagtggagagtacacagcagaggaactgtgcatcagggctgcacaggcatgccgtatctctcctctttgtcacaacctctttgccctgtatgacgagaacaccaagctctggtatgctccaaatcgcaccatcaccgttgatgacaagatgtccctccggctccactaccggatgaggttctatttcaccaattggcatggaaccaacgacaatgagcagtcagtgtggcgtcattctccaaagaagcagaaaaatggctacgagaaaaaaaagattccagatgcaacccctctccttgatgccagctcactggagtatctgtttgctcagggacagtatgatttggtgaaatgcctggctcctattcgagaccccaagaccgagcaggatggacatgatattgagaacgagtgtctagggatggctgtcctggccatctcacactatgccatgatgaagaagatgcagttgccagaactgcccaaggacatcagctacaagcgatatattccagaaacattgaataagtccatcagacagaggaaccttctcaccaggatgcggataaataatgttttcaaggatttcctaaaggaatttaacaacaagaccatttgtgacagcagcgtgtccacgcatgacctgaaggtgaaatacttggctaccttggaaactttgacaaaacattacggtgctgaaatatttgagacttccatgttactgatttcatcagaaaatgagatgaattggtttcattcgaatgacggtggaaacgttctctactacgaagtgatggtgactgggaatcttggaatccagtggaggcataaaccaaatgttgtttctgttgaaaaggaaaaaaataaactgaagcggaaaaaactggaaaataaacacaagaaggatgaggagaaaaacaagatccgggaagagtggaacaatttttcttacttccctgaaatcactcacattgtaataaaggagtctgtggtcagcattaacaagcaggacaacaagaaaatggaactgaagctctcttcccacgaggaggccttgtcctttgtgtccctggtagatggctacttccggctcacagcagatgcccatcattacctctgcaccgacgtggcccccccgttgatcgtccacaacatacagaatggctgtcatggtccaatctgtacagaatacgccatcaataaattgcggcaagaaggaagcgaggaggggatgtacgtgctgaggtggagctgcaccgactttgacaacatcctcatgaccgtcacctgctttgagaagtctgagcaggtgcagggtgcccagaagcagttcaagaactttcagatcgaggtgcagaagggccgctacagtctgcacggttcggaccgcagcttccccagcttgggagacctcatgagccacctcaagaagcagatcctgcgcacggataacatcagcttcatgctaaaacgctgctgccagcccaagccccgagaaatctccaacctgctggtggctactaagaaagcccaggagtggcagcccgtctaccccatgagccagctgagtttcgatcggatcctcaagaaggatctggtgcagggcgagcaccttgggagaggcacgagaacacacatctattctgggaccctgatggattacaaggatgacgaaggaacttctgaagagaagaagataaaagtgatcctcaaagtcttagaccccagccacagggatatttccctggcattcttcgaggcagccagcatgatgagacaggtctcccacaaacacatcgtgtacctctatggcgtctgtgtccgcgacgtggagaatatcatggtggaagagtttgtggaagggggtcctctggatctcttcatgcaccggaaaagcgatgtccttaccacaccatggaaattcaaagttgccaaacagctggccagtgccctgagctacttggaggataaagacctggtccatggaaatgtgtgtactaaaaacctcctcctggcccgtgagggcatcgacagtgagtgtggcccattcatcaagctcagtgaccccggcatccccattacggtgctgtctaggcaagaatgcattgaacgaatcccatggattgctcctgagtgtgttgaggactccaagaacctgagtgtggctgctgacaagtggagctttggaaccacgctctgggaaatctgctacaatggcgagatccccttgaaagacaagacgctgattgagaaagagagattctatgaaagccggtgcaggccagtgacaccatcatgtaaggagctggctgacctcatgacccgctgcatgaactatgaccccaatcagaggcctttcttccgagccatcatgagagacattaataagcttgaagagcagaatccagatattgtttcagaaaaaaaaccagcaactgaagtggaccccacacattttgaaaagcgcttcctaaagaggatccgtgacttgggagagggccactttgggaaggttgagctctgcaggtatgaccccgaaggggacaatacaggggagcaggtggctgttaaatctctgaagcctgagagtggaggtaaccacatagctgatctgaaaaaggaaatcgagatcttaaggaacctctatcatgagaacattgtgaagtacaaaggaatctgcacagaagacggaggaaatggtattaagctcatcatggaatttctgccttcgggaagccttaaggaatatcttccaaagaataagaacaaaataaacctcaaacagcagctaaaatatgccgttcagatttgtaaggggatggactatttgggttctcggcaatacgttcaccgggacttggcagcaagaaatgtccttgttgagagtgaacaccaagtgaaaattggagacttcggtttaaccaaagcaattgaaaccgataaggagtattacaccgtcaaggatgaccgggacagccctgtgttttggtatgctccagaatgtttaatgcaatctaaattttatattgcctctgacgtctggtcttttggagtcactctgcatgagctgctgacttactgtgattcagattctagtcccatggctttgttcctgaaaatgataggcccaacccatggccagatgacagtcacaagacttgtgaatacgttaaaagaaggaaaacgcctgccgtgcccacctaactgtccagatgaggtttatcaacttatgaggaaatgctgggaattccaaccatccaatcggacaagctttcagaaccttattgaaggatttgaagcacttttaaaataagaagcatgaataacatttaaattccacagattatcaagtccttctcctgcaacaaatgcccaagtcattttttaaaaatttctaatgaaagaagtttgtgttctgtccaaaaagtcactgaactcatacttcagtacatatacatgtataaggcacactgtagtgcttaatatgtgtaaggacttcctctttaaatttggtaccagtaacttagtgacacataatgacaaccaaaatatttgaaagcacttaagcactcctccttgtggaaagaatataccaccatttcatctggctagttcaccatcacaactgcattaccaaaaggggatttttgaaaacgaggagttgaccaaaataatatctgaagatgattgcttttccctgctgccagctgatctgaaatgttttgctggcacattaatcatagataaagaaagattgatggacttagccctcaaatttcagtatctatacagtactagaccatgcattcttaaaatattagataccaggtagtatatattgtttctgtacaaaaatgactgtattctctcaccagtaggacttaaactttgtttctccagtggcttagctcctgttcctttgggtgatcactagcacccatttttgagaaagctggttctacatggggggatagctgtggaatagataatttgctgcatgttaattaattctcaagaactaagcctgtgccagtgctttcctaagcagtatacctttaatcagaactcattcccagaacctggatgctattacacatgcttttaagaaacgtcaatgtatatccttttataactctaccactttggggcaagctattccagcactggttttgaatgctgtatgcaaccagtctgaataccacatacgctgcactgttcttagagggtttccatacttaccaccgatctacaagggttgatccctgtttttaccatcaatcatcaccctgtggtgcaacacttgaaagacccggctagaggcactatggacttcaggatccactagacagttttcagtttgcttggaggtagctgggtaatcaaaaatgtttagtcattgattcaatgtgaacgattacggtctttatgaccaagagtctgaaaatctttttgttatgctgtttagtattcgtttgatattgttacttttcacctgttgagcccaaattcaggattggttcagtggcagcaatgaagttgccatttaaatttgttcatagcctacatcaccaaggtctctgtgtcaaacctgtggccactctatatgcactttgtttactctttatacaaataaatatactaaagacttta

SEQ ID NO: 867 - protein, 1154 aa, Homo sapiens
MQYLNIKEDCNAMAFCAKMRSSKKTEVNLEAPEPGVEVIFYLSDREPLRLGSGEYTAEELCIRAAQACRISPLCHNLFALYDENTKLWYAPNRTITVDDKMSLRLHYRMRFYFTNWHGTNDNEQSVWRHSPKKQKNGYEKKKIPDATPLLDASSLEYLFAQGQYDLVKCLAPIRDPKTEQDGHDIENECLGMAVLAISHYAMMKKMQLPELPKDISYKRYIPETLNKSIRQRNLLTRMRINNVFKDFLKEFNNKTICDSSVSTHDLKVKYLATLETLTKHYGAEIFETSMLLISSENEMNWFHSNDGGNVLYYEVMVTGNLGIQWRHKPNVVSVEKEKNKLKRKKLENKHKKDEEKNKIREEWNNFSYFPEITHIVIKESVVSINKQDNKKMELKLSSHEEALSFVSLVDGYFRLTADAHHYLCTDVAPPLIVHNIQNGCHGPICTEYAINKLRQEGSEEGMYVLRWSCTDFDNILMTVTCFEKSEQVQGAQKQFKNFQIEVQKGRYSLHGSDRSFPSLGDLMSHLKKQILRTDNISFMLKRCCQPKPREISNLLVATKKAQEWQPVYPMSQLSFDRILKKDLVQGEHLGRGTRTHIYSGTLMDYKDDEGTSEEKKIKVILKVLDPSHRDISLAFFEAASMMRQVSHKHIVYLYGVCVRDVENIMVEEFVEGGPLDLFMHRKSDVLTTPWKFKVAKQLASALSYLEDKDLVHGNVCTKNLLLAREGIDSECGPFIKLSDPGIPITVLSRQECIERIPWIAPECVEDSKNLSVAADKWSFGTTLWEICYNGEIPLKDKTLIEKERFYESRCRPVTPSCKELADLMTRCMNYDPNQRPFFRAIMRDINKLEEQNPDIVSEKKPATEVDPTHFEKRFLKRIRDLGEGHFGKVELCRYDPEGDNTGEQVAVKSLKPESGGNHIADLKKEIEILRNLYHENIVKYKGICTEDGGNGIKLIMEFLPSGSLKEYLPKNKNKINLKQQLKYAVQICKGMDYLGSRQYVHRDLAARNVLVESEHQVKIGDFGLTKAIETDKEYYTVKDDRDSPVFWYAPECLMQSKFYIASDVWSFGVTLHELLTYCDSDSSPMALFLKMIGPTHGQMTVTRLVNTLKEGKRLPCPPNCPDEVYQLMRKCWEFQPSNRTSFQNLIEGFEALLK

SEQ ID NO: 868 - DNA, 155083 bp, Mus musculus
  misc_feature (1)...(155083): n = A,T,C or G
tgtggggtgtgtgtgtgtgtgtgtgtgtgtgtgtgtgtgtgtgtgtgtgtctgtcctttttgtctgtttccgtcatctaaagatccttcttctgtgaggctgacatgccttgatttctaagatggccgacagatctagacctgaagcagattccaacagagccccacggtggcatagtcatccctacctcctacctcgttgcttaagataatcattaaatattaaataaataatagagttaataactataacatgctgacacagagtagggagtataacatttgacaaaaatgaataatcttgcaagtatttaatgttgcagacatgagcttttgtgggtagtaaagagaccctttcagtctgtcattgccaccttgctggctcctaaagtttgtgtatctactttaattaacgtgaacataaaacttcctccttatattgaccaagatctgctgctgacacccagcaggctagggacggtcagctcttttctctaggttgctgagtctggggatggcaacaggtattctttcagagacaattccatatacatcatgtgaatctgggtaggaagaaatggatagttttatagtgctaaaaaccagttagctttataattttaaaactagctgtagccttacctttagtcccagcacttgggaggcagaggcagggggatctttgtgagttagagagcagcttggtctacatagtgaattctagaacatcaaaggttatatagtgagaccctgtctcaagaaagacacaaacaaacaaacaaacaaacaaacaagcatagttctgtactgaacgcccagcatccttggctctgttcccggggcccatcttgtggttcattcacggcttctcaggctatgcattattcctgtacatttctctactactcatttctcttttcattccctaaacatcttgggaataagactattatgtatgactattaattatacttactagattaattgaaacaaaatcttgctcaaatttttacttatttatttttttctgagacatggtttctctatctagctttggctgacctggaactctccagatcagaactcacagagaccctgctacctctccctccggagaggtgctgggattaaaggtgggagctaccatggcacttagcttttgaaaaaagtcctgggaagaagggtacatattacttattcccttcatttaatatttgaggagataaatcaagagatactacatgacttgccggaggcctcctagcaggtaaatacctaacttaggcatggctatctgtagacgtccccctctgccacatctcccagcacagaaccgacatgttcccacgtactgatggaggggagaagtaagatgagctaccacccaatgatagaaatccatagctcggttttatctggttctgtaaagtgtgatctgatttttttttttccacatgacatcactatcacttgaacacctcaagccacattctctgatggtagtcaggctacaattttagtctgctgctaatgagtggcacacaatgagacagtgtgaacttggccaggagcccttaaacttcctaaaactcagctattttatcatcagcaaaaagagaatgctaattcttatggccttgtagcagtgctaattaatgtttgcctagcatacagagcctcagaaaaggctagttatcatttttatgaatattagtacagatcttacacctcaaacatgggtagtcatggggctgaaaagtccagaaagctgtgagaaagaccataactttgagtcgtctttggggcagctgaatcttctggaacagctaggtcctgtagcaacatcctgctaaccaaaaaaacaaacaaacaaaaacaaaaacaaacaaaaacaaaaacaaaacaacaacaacaaaaaacctataggtaagaaagaagaatgtggcttctaggaactcttggcatcttttactgcatgctgctttttcagagaactggagtttggttcctagaaccatgtcacgactgcctgtaaattccaggggatccaataccagctcctagcctctgtgaacgcccactcccatacccatatatacatttaatacaaacaaaatcttaaaacacatgtactttgagtatctataattgtatttacaatgtaaatacttggacaatcatgagataaaaggctatatgcttttgttgttgtttggtcttaaaggctcttacccccttgatgtctgaagctttatgctaatttatttctgccagtggcgatcaaaatttcttgattcctttctgtgttctgctaggcatttttgtttacaattacggaagtttattctttgacaatttcatacaagtatatactccattctaacagtgttagacattttaatgcttacctacttgatgtgtataaacgatgcttcaggcccttttgttgctttttgtttttggagacaggatctcatgtacctcgggctggctttgaactcctgaccctcctactcgacatcccaaatactgtatataggcatgatgccagtaggcatgcatggccgtgacaaccatggccaccatggtcatttgtctttgaaaaaattgagttcctttgataaatagtagatctaagtatctttccagaaacactggctgctcagatgagcctctgtgaggacttggtaccatccttccctcccttttatgtggtggtttgtctctttcttcttctctctttatagggattctttaaatattctgggttctaatcagttgcttggtttagatttaattgtgtagtatttttgttttcttcgagttctgggatcaaattcaaggcttctccatgaatgggaatatgatcaaactgtgcagagtggaaattaacccttgcattgtatctgtccttcccagagaatgagtttttaatcatacctcaaagttgttaagtgtagaaaagggaccctccagagggtagatgtatttctgtaaccagaaaacttctctggcccttgggagtactctcatcagccctgagttcctctcacaagagatcgcctcaccctgctggtgcctgagatatgctcttcctgggaagacacagctggaaccagctcggtctgtaccagcagatattgttttttaggacaagaagagagcagaacacatgccagttaatcgctagcttggcttcttgtttctaacagtgtgttctttttctcttttaaacacattcgatggaggtaatggttactggaattaaacaagattgcaaatataaaaggagtttaggggctgagcagatggctcatcgaggaaagtgtttactgaataaagaggaagacaatactttagatcctgagcacccatgtaagaactgggtgtgacaggccatatctgtcaccctagctcttgagcacacctgcatgtacatgtatttatcacacacacacacacacacacacacacacacacacacacacacacactcattcatgcatgtacatacaaacataaaatacaagatagttggccctgacaagtagccaccactttgcccgagagacagaagtcacttgactaatggcttcggccccaattccttctcctgacacacacactgtgtacaggtacataactgacggagattctccaaattagcctccagatctgtatcggcagttcctagatgcgcaaataccccacacgactttagagtcaccaagtcagaaactctagaggcagagccctgacgtctgtcctttagcaagccatgaagtaacctcagtacaagctaacattcgtcaaactggcctgcgagtggacaagggctcttgtccagtgtgcacctaagcttcagctcttcatttgccagcttgtggcatgagtaagttaccaggtatttctgggggtcaagctcacagcaatacaagaagatggtaggatgtagccctttctttacagggctgctgtgaatgtcatgaagtagcctgactctgctgctacttgtctgtgcagcttctggcaaattaccttgccttttactctcattgagattgtaacatatatgtagtaatgtgtgccagctaaacagtgcacacatatgtctgtctatctatctatctatctatctatctatctatctatctatctatctatctatctaatctatcaactatatttaagagtatgtgtgtgtgtgtgtgtgtgtgagtgtgtgtgtgtgtatgttaggggaggactttctttcaggcattggctcctcctcccactttgttgagtcgggtttctcttgttgtttctccagaccagcttgccacagagggtctaggagactgtcttgtcactggccttgtaagaatgctcagattaccgatggattctagtgcatctagttttttgtgggtttggagctgtgattctcaacctccctaatgttatgaccctttaatacagttccttgtgttgtagtgacccccacaaccaaaacaattatttccattgctacttcataactgtaattgctactgttatgaatcataatataaagatatggtatgtgagatgtctgatatgtgacccctgtgaaagggtcattcagctaccagtgggtttgtgacccacatgttgagaactgctggtttagggactcaaatgccagtcctcaggcttacactgccagcccttgtttccactgagctctcttcctggcctacactaccttgttttatggtcttcattttatgaataagaaaaaaaatcagagcaaggttgaataatgctttgcagtgacattaactggtaccctaggattcaatcccaggcagcttgaggtgagcacgcttgcattaaagccactgctttggcaaatgagatcttcagcaaatttacacaaatgacagtaaaagttaaccccttggcaagtggtaggcattccacaggttagtttccttcctcttgtctggtagcttggcttcctggtaattctgccttcctcgtagtcacctgcctgcccccttctgtggttcgtctccgagtacacttggttgcacatccccacagctcagcgtgacttttctctctccattttacctctttagctgccatttgggtgctcagagcaaaccaaacagatttagctgggtggagaaagacaagtgtggtacttctgagatgctgtctctccttcatctcagcaggcatgtgactcagaagtggcttctaacaagagagggactgtgcagaactgcagaggggcttggtggcaagtggagttgccagacccattccctagacccagttattgagacagagcgtcacgccatgactggctacttagaatggactttgttacaagtctatttgaagcttggggtcagagacatcagttagtggaaagatccaaggcttcggtctgtttgttcttgttcctaaacgaggcagggtcttgagtctctgtgaggcaggacaagacttctgagagcttgcctggctctggctaaaatggcctgaggatcagagatctaaggttttggtaaatatggtgtcacaagggaatgttaaacccctttccatttaataagaccttcaaatctcattcctcctgattttaagcaagagaaagacgtgttacccatgtacagtggctcaggcctgtagttccagtgtttaggattctgagatgagaggactgctgaatctggggccccaccttttttgttgttgttgttttgtttttttgttttttgagacagggtttctctgtgtagccctggctgtcctggaactcactctgtagaccaggctggcctcgaactcggaagtccacctacctttgcctcccaagtactggaatctgggggcccatctttaaaaagggggaggagataaaacctgcacttgggtggctcaaccagaggattgcaagtttgaggttagcctgggaatatagtaagactttgtctcaaaaatgtaataaactggggtgtgtcacatagctcagcggatgaaggcccttgctgtgtaagcctaacctcttgagttccattcctggaatcatgagaagatggatgccaagaatagactccacagaattgtgctcttacctccacgtgatcaagtgtcatggcatgtgtgagttctctgtttgtctgtctgtctttcatgcatgttctctctctcctgcacatgataaataaaatataaaaacaaacaaaggactagttaagggaaggtagagttagacacatgtaagaaatgttaacaaaatgtgcatggttaagaggctcactgcacagtttactcaacttctttgcatgcttgcaaccattccaaaacagtgttaggtaacatgtaggtatttgcagagatggtcacacttttaaaaaaaagttccttcctttgacatatgaatggaagccctcctcccaccctctactacttcatatcttgtactccttccctgaaacaaattcagcgtgagtgagttcagccagccagtgggcaactcctctttataccacaggctttgtctccttcctggggtataatcctcacaataaccctacaaactaattactattttccatagtttaatgaggaaagccgaggctcagagggctgactcaggtaatcatattaaccttatagcactgagggtgaccttccttcctggtattgtgccatactctttgtgtttgaagccactgggcctcacccagccttaggagatggtcctattattacctttatcctacacagttggagcagaaacaagaatgcgtcccaactttctctagggatcagtaaatggcacagctcgtatttggacccagtctattctgcctcagagcccttttgccccctctattcaaagccagtcctggcatctgtttgcctgatttggtaactggaggccgcaggctcctgaagatagaacacattgtccaccactgtggaatattattgaatgaaagggcggggcagggggtctgcagcatctcagccccccgaagtgctccttctgggcacggtttgatttagtccttggaggaggagatacccagttttttgtttttggtttggtttgtttgttttttgtttttgtatgggcctgaggctcataaaatgaatgttaaggagctataacaaacccatttatgataatcagccttttggcactattaacaaagtgtgtgagataacttacagagggaaaagattttttaaaagtattttgacatttattacaaatgaatgcctgtgtgtaggtgaaactcagaggacgaatttggggagttggctctcaccttccatcaggtgggttccaagcttgaactccagttgtatggtttggcattaagtgtccttgcctctgagccatttcactggcttgggaaatgctttgttttcacttctgttcctaatagggttgacacattgctttgggtcagtggtgagcagcatattattgggggatcacacagcaaagcaaaaccagttaatcttgtggccagaaccgtgaaaggggaaggggttacagtcccacaatctcctttgagactatattctcagtggccgaaagacccccaagggtaccctatctcttaaaagatttaccatcccccacacagccctgctttggaaccaagccttaatctctggggcatctagaaggcaggcaagatctcggcctttctcattgactctcccctcgctggcccccagcttctaatgaacagaaaggtgttatgcattgctaaggagtaatgggacccaaaaccaaatgcttaaacatttccaaattctcagggagtcttcagatttaaatggctaaaaatccactcgggaacctctagtgtccaaggcaacttcctctttgtggccatacttggctcaaggctgcagcaatgagcagatgaacacttaaaattgtcaccttataagtgtgcccaagcggctagcctcacagtgacagagtgcttggtttaccaagttctgcatctcttctctcccttcatcttcccagcagcctggtacacactcagggcaggcgatgcgctcctgtttgtaggcggggaaatgattcttgagaggttggccccacaccactcagtttgtaatggcagaggggtctttagcatcttacccaccacatcatcttctgtgtcaatactgtatttaaatagcaagttccaggggtgaaagcaacaaaggatttccttctgttggttttcttgcaacatgggttctgtacttcattagcgttaatctctctggagatcagtttttccagtctgtcatggaaacaaacaaatcaaccaatcagccactagcgaggggaaatctagtagagaatgttgtgagggtttagaaatgaagaaaattggggctggagagatggatcagtggctaagagcactgactgctccttccagaggtttttgagttcaactcccagcaactacatggtggctcacaaccatctataatgggatctgatgccctcttctggtgtgcctgaagacagctacagtgtactcatatacataaaataaatgaataaatcttaaaaaaagaaatgaaaaaattatttttatttttcaaaactgattctgatgtatatgggtgttgtgcttgaatatatatctgtgtatcatgtgcatgtctggtgcccatggaagccagaagagggcactagatccccagggattggaattatagacagttgtaaactgtggagtggtagctgggaatccaacctgaatcctcaggaagagcagctagtactcttaaccactgagccacctttctagcccctttcttttatttttaaagatttatttacttaaaaattaagacttaaatttacataaaaagttattgatttttgtgtacatgtgtcttgtggtgtatgtatagagggcggagaacttttttttttttttttttttttttgagtggttctctctgctatgtaggtaccagggattgagttcaggtgacagagtcaggcttggtggcaagcacctttacatagtgagccatctcactagacctgaaaaagcagtttacagtcttttttctttgagggcgggcaggagataaagagctgcaaggcaatgccagggccaagctttgaatatgctaggcaagtattgtaccatcagccacgctccagccccaatgttaagtaaggatgtttagaagactatgataatgccgacccattttcagtaagttagatgtcatctcatttggccaccgtgtctaaaaatggcacttgttagttacctcattgtcatgtgccgttattcctcacagtgtttgccgcccattatggtttcatattgcttgtctgaatgctctcacctaaaggtaaaaattgttatgagggcagggacttgtctgctcttatcctctggagtcccaacaggtaaaacaatacctgccaaaaatgactgtttgttgagtaagtgacagaggaagggtgtgatgtacccgggttacagaatgatacaaaattctgtgcgaaaagaatgactaaaaggtttgctggaaacttccttgcctctcagtagaggggtctactgatctggcttcctcatacctggtcctggctgagtcactgacacaggctggtgtgcaaagcttccttgcttatcagcttatatcttggtgaagcagcattaggaacctatgtcctcgaagtagacatgggccactgtagggcacccactgcctctgtgtggtgccattgagaacagagctgggggtccgttcctgtacactgctccatctgcaggatgtagagctgtgcctgacccacccagagtttttgttgagtaaatgaagcagcgaagagtacaaagaggacgctcagggttcttcatccttcccaaagtcacttgaaaataagtccagaccacagcgcagcccttcccagagcaacgtgaaccaagtctctctggaagcaagaagaaactaagcagttggatcctcactccaaggaaggaagaagggcaaacctaggctccagatccggttccatgccatgttttggaagtcgtgtttacgtctgccttcatcctcatcccttccgcttcagcataagcaaaattataaccctgcacgctgacttgtatgctattatcatagcctggctgctcctgcgttgagggacttcgcccccgggatcgctgactgtctgtgaatgacaaatccaaagtcaggggttgcagagtcagccggacttgcctgctctcgtgcagcagcgggagaaaacagaatgaaagattctgaaaataaaggtaaggggctgacatcagaggggcggctggtagacgcttgggggagatgtcacgacgtgaatgtgcttagtttgtgctgatggctggctgctttgattactgatgtatcttcgtaatttttagttatgtaatatatgtcctctttaagtgactgttttctaaataccatgtcattcagttttccattttttttgcgttactaaaaatatatttttattctttatttaatcttggccaagtacacatatctcacagttttctttataatcgcttccagaattttgatacttttattttgggagtgtttataattgttaattattaaaatgtacggtttcagccaattattggaatagctggagatcgtggttcttaaaacagttcgggttttctagagaggcattgactgagaatatccagatgaacgttcgttcatcttctttgggagggctcagcagggagtcgtagtcgctgaccttcagaactgtttaccttgcacagggatgttctgttgcaaactccccctgctccccgccccccacccctcactgcctttaaaaaaagaaaaaaaaaaaaaaacccaccagcatgaattctgttggaggggagggcaaggacagaaacagattgacgtgaaagccccccaaccaaggactctggaggatttaggggttcaccgccggggccctgggaaatttctgccgcagcggggggaggggcaacagcccccagctcgccccagcacacacgtggttcagggtcgcacttctttctgcatccttgattctctagatcctggtgcctgccgaggggccgacatctccgcagcctggagctcaggccgtgcttctccgcagctgctcagtttgctcgcgccgccgaagcttcctggggccttgtggtttccccttggcagggcaggtgcgcaggtgcaggccggtggtgccaggtgaccgctcgtcccagcccctgcctgcctgcatgccccgtagcaggtgtggccttccccacaggagtctgacctctggttgttaaaagatttctacctggtgatggacagcggtatatgcacccataaacacccgagcaaagagtgatcatgagtcttttacagtgtgatggatgccaggggcgaggctggctttccagtctaccagaagcaacgcagtgtcttaatggatccggggtttctctgatcgcgccttaaaagtgactgggtggggcctggggttgttggcaccatcagctcagaggctttggacccttcacattcacgcattgagccatgtggttttggtgcttaaattttaattaagcagttccagggaggaagaaacagctgtgtgaggccgggctgaaagcatagaggacagttctcttctgtctcctagccagccgccactcatggacaaataactcctatgtggccaaactattcaaaatcagtttccgaagagggcacttccttgctgtttgcaggggctagagaaagggttaatgcagaaagaggggaaaaatgcctatttgtcaagtcatgctaggccatggacatggcttagaaacaattaaagctgtctgaatcacaggctcaggcccggctcatttaagcttcaggtctactgacctttttaatgggagctggtatttggaatttttgtattgctctgtgttggaaagagccgcgggctgtcaatccaaacaggcaggttctgacttgttcagccatctctccttagaaaccgggacaagactgttgattttcttgggtctcagtttatctcctgaatggcgtgatattagatgacattaatgctttttcagatcgtgagggatttgggtatatcgggagcaacatttcagacaggcacagtagaaaaaagttcatcttagaaactattgaacgtatgtgagtaacttgtttttgaagctgttggtatgtgcagacatgtgggctgtattctgttatcaagactatgttctttgagtcctaaccaaaacacaccgaagaatgatgaaacaagccataacaggtttcattttgaaagagtctgtgaaatgcaagcatacatgtgcatccaaccatatatgtgctattgaaagaaagatgaagtcagcaattgccctctgatttacaaagatgtctgagaatccaaacaggtcacgagttaatgtatatctagggtcccctgagaggctttcaggccaatttcttgctgtgctgggagatgtgtctatgttgaggagtggataagagtgtgtgtgatatcatgtatgaggtgcatgtatgtgcacacagacacgagaatgcattcagagagagtatgaacacgtccaccagaccaggagagctatttttgggaagcaaagcaccagttgttgacctgaatatgaaataaatgtacaaaaaaaaaaaaaaaaaaaagctgaaaaggactgctaaaaaaaattaccaaaatggagggattttttttggaagtcatttcttgtaacggctaacagaggaaccaggtgaaattgcaagaggtgatggaggtggttggcgcttagtatgttggcaaagagaacttgaacttgaatgagctactgtctcacgactggtgttcaggaaatggtggattgtggtttaataactgccttcctttctgtaacctgttctcagtacatctcggacagcccagtgaggttattaactatgagaggcaatttttatctcttatgcctcttttataactttatctcaaaatgctttgcaaataagaaaaaggcctgtgtgttagacaattaagatacttgaatgagttaactaaatattggcgagcatggctacaagttttagtaataaacgtcctagagcctattttatgatcaacgacggtgtgacaagttgtctgtcaggttgattatgtattgttccagtagtacaggggaatacttcctgtgcagtgtaagagtagtggaattgtattcaaacccagactgttcaccccagaaaccacttctcaggtaggcagacaactcacgccataaaattcgctttaaaataaaattgcatgggggctggagagatgacttagcagttaaatgcatctgttgttctcgtagaggatgtgcggtcagttctcagcacccacgtcagacaggccaaactgtctataactccagctctaggggacctgatgctccccccgacctcttcagtcaccatacatccccacatgtttacataaataaataataactataatataaagattaaaattgcctatattaatattagaattaatttatcttgtataaaacagggaaatatgaaccccagaaaataaaataacgacttttgactaattttctagtttgtttgaaacatagacacagtagagtttgtgaattaccaataggtcatagagatatgaaagaacaagagaggagaatttgaaaaattattattattattattattgcaaataaaaggcagagaaggggttggggaatctagtccagtggtagagcacttggctagcaagtacaaggcccgggcttcagtcctcagctcggggagggcatgggggggggggggagactaacaaaaagtcagagaaaatatttctcttccagtgcttctgtattttgagagattttatttactatttacaaacatgacattctgtgagcagatgagggatgtggctaatgtttggatgtgtgagagcaggggtttgagcatggtctgtgttatagggacctgcatgattttgctagaagacactgcaaaatgagatgagttgaacaaggtcagacggagacttttaggcctcacatattaaatctggcttctattcttcagtgaaaaaaaaaataggtgaaaaaaatgttagtttttgtttcccttaaccagcatgactcctttgatatcttcggagcaaacacatatttcaaggtgatttttttgtttttgtttttttttttttttgtcatggctgcttttgcctggttgggttggtgagatggtatttttgcaggaaagatctgtaaatatcatgtgatttctcaggcaggggtctagggcttgctcatgccagtggttatcaatggaaactgaatctgcactggaaacctgcaagtcagctttcggtttggtagtgttcaccggcagaaagaagctagagctgtttgagttagcttgtgtgacctgtaactttgaaatgtttttgttgaagaggtgagactctttatagtttttccagcctagaatgtatgttggtcttatatacatagttaaatgtccaggactaactggatgtgatgatgcacacctttaatcctagtactcaagagacagaggcaggcagagctctaagttttaagtcagcctgatctacaaagtgagttctagaatagccaaaactactcagagaaaccttgtcttgaaaatacttccccctccccaaaattcccaggattaaaaagtgctatcaaatctaagaaagtttataacataattttgttcccttcaaaaacttatctaatgcaatattggtattttgcaaggtaatgggaagaagttgcaacacaatttatccttcttattcagtctacatacagatgcaaatacctcgctacaatgtaacatggttctgcctgagtgtttctacattacaataaatatattttattattaatgttatatttaatttctgcttggtgtatgtacttggttagctacattataacatagttctgtctgagtgctcacacactgcaatgcatatactttcttattaatgtcttatttaatttttgcattatgcctatgcatgtgtggatatgtggaggccagcacaggttgtccggtggtttcctccattgctcgcagccttcctgctctgagctagggtttctcactgaaccagaagctcaacatttttgctaagttggctggctagtgagctctcaagatcttattgtctccagcccccgcaccccccccccaaccagtgccgaggttataggcacttacaattatgcccagcttttttacatgggtcctggggatttgaactcaggtcctcacgcttgcagagcaagtactcttactcaccaagcctaagtattttccagtccccctgaatattttggtttctttttgtgcagtgctggaaagcaagcccatgctatctgctaagcatgcgaagcaaacactgctatctgcacttctcattcttttaaagacttatttatttattgtatgtataggagtgctctagctgcatgtatacctgcatgccagaagagggagacatcagatcacattatagatggttgtgagtcactatgtcacagggatttgaactcaggacctctggaagaacagtcaatgctcttaaccacagagccatctcgccaacccacacttctcattcttgaccttcctatttcagagaggtttgaatcaatgttaaaaactttggaacaatatatattcaatcctgtaattttggtgccttttaaaaaaagatggagacactgtataactgtttgtaattgaaattgagctgagcaaaacataccctatttttctttttctttcacctttgagataaggtcttatgatgtgtgcagcttacactggccttgaacttggtttgtccctggctggtcttagacatgattctcttagctcagtctcctgagtgctgaggttatgagcgaatgccatcatgtctagcagagacacggggacatcatggatgtaaacctgctggaaagtgatgccatggggttattgattctctttgccactgaagctggcacttggaatttctgtttttgagttgttcgttaggatacacaaatgtgatgcatttttagatcttggttttattttgatgatcttgctaaatgcacttaataatttgaatagtttttagatttgaaagaatttcctacattgacagttttctctaattaagacacttttatttccttgtttccaattcttacacatttttaaccttctcttacttaagcattgactaggatgtctcttaaaatgatgaaagaggggccggcaccacggctcagtataaaggcccttgctgccaagcttgatggcctggtttgactcttgggacccacgtgatagaaggagagaacacattttcatttgaagctgtaattctccctttgagcctggctgttatagatgctgcaagtattgtgtcataattaattttttataaactatttaataacttccattacatcttttttttttaatccagagggtcatatagaagtgcacttcattaccaggcaaccgagtggttctgtctagttatttctttgctattgacttctagtttctttctactgtagtaagaggaaggactgtggatatagttctttttagaaaaaaaatttgagttttttctactgtatatatggttgtcttacatatttttttagtgtgtatatactttgtatgcactttaaaataatatgcacactaacgttgcctagtttagctatgttggttatttcatttttttcttaaaatgcaaagatttatttttatgtatgtgtatgtatctgtgtgagtgaatgccatgtgtgtccaggtgcccctggagacaaagtgtccattagatctcctggagctggacttacagggttgtgagctgatgtgggtactgggaactgcacttgacctttggaagggcaggatgctcttttaactctgagccacctttgctcacttctttgagatagagtcttgttctgtagcccaggctaggctagaacccactgtgtagcccaggctgtccttggactcatagcagtcgtcgtgtctcagcttccccagttgggattgccggcatgagacgccttggcctgcctgccttggcatttctctctggtgttgccataaagcctggcccagaacttgctgtatagcccaagctggccttgaagtgatatcagttcttctgcctctgtctcctggttgttaggatcacagttgggagctgacattctcatcttgtctttgccttttgaaggtagtgccactgggtgtgtgtaattctgggagaggacaagaatggcacgtattgtggaggctgagctgggagagaagccagaagttcaaaactggcctgggaaacagtgagaccctgagtcaaaacaacacccacactcacacaacccccaaaccaaaccaccaacaaatcctaagctggcagatgtcttaaatttttatacatataaaatatataaaatgtatatatgtatataagtttataatatgtataaaatataaaaatacataaaattgagggttgttttttgtttttttgtttttttgttttttttttttttttctgttttgttttttccagacagggtttctctgtgtagccctggctgtcctggaactcactctgtagaccaggctggcctcgaactccgaaatccacccgcctctgcctctcaagtgctgggattaaaggcgttcgccaacactgccttgcaaaattgaatttttattggcacactgacattatacatagcattagggctccaagggtttatgatcaagctagaagttgtcgtatagactatatccacaaatctttgccagcacccaacgtgcatttttcgggtttcctattttcagtgctgtgtgttatgttaactggaccctggagcttcctctcatgtctggtcatttacttgggtcattctttgagcatttgtgcacctaactcctttcagcacaaatacatgttccggtggctcttgaatcaccaggagagtaagtcagcctactcacgtgacttagagctgaaaggcggtgatcgatggtatgcggtcgtggagaccgcggaaagccttttcatgttttctattaaaattaggccaagaaacaaactggcacttcctgtcagtctcttttgatgtgcgtccctacttcacttcgagtagggaaaatgtgccacggagggaccctcgggtgccacagtgtgtaagtgcggtcagtttgtggacgtacattgagctgatcctgtgttgtgttcacttttcagtacatatgttacactcctgataaaaattataaaagtgggccctttgatatgaaatgtctccccccgcccccaatattgaggtaggtttcactctgtagccctgactggcctagaactcagatatgtttaccggtgctgtgattgtgaaactgagccatcattcctgatgatgtcaagcattctagaaaagcgccagggacaaggaaagcttgaggacggctgatccaggcgagccttgtcgtatgaacgagattactagggagtaacggaacccgggaactgcgcatgtctcggagcccacggtcaggccttctgattctcactctttatacttttaaattcgctgatcagagagtgggggaccagaggatgttctcaaattcgtaaagcatccgcatgagtcagcaccttcctcctttttgcggttccatcttgtcctcattctcttcccaggcatttaaaaacagatacttttatctcaaactgcacctttgaggccttttaaaaattacccccttagaatcatttgatctctcacacacatacgcagtcgagagagagagagagagagagagagagagagagagagagagagagagagagagagagggctttgtgcctgtgaaatctgttcctctctgggccatttttagtatggggctgcattgtttaaatttagaagccttttccaagttgagggggtggtggtagtttgcagaaattgaacccggctatgactcctgctgctgcaagataaatgggaaggaaaatctgggaactggttttaggagagggccaagaaagggacttaggaacttgccttaatgtcacaaaagtagtgtggcactggcctttaatccctgtacccaggaagcaggtgcagggggagctgagttagaggcaagaggccagcctggactacgtgacaggtttcaggaaaaccagggctacacagagacatgctgtcttacaacaaaccctgttgcctgttgagaatatagttacagtatcttttttgcttggaagcccagactttaaaattaaaacataaatatttaaacattaaccaattataaataattactaaaatgttagcattcaacattgttagtattaatattaacgtcaagatactaaaatatagttatgtatatgcacacatatgtaggcatatccatataccaccttctgttaactttcagtcactgtgacaagatagctgagaacaatcaccgaatgagaggagagattattttggcttacagttgtagagatggcagtccttggccttattgttttggggctttgttgacacagcgtatcatgatgggaccatgttgtggattaagcctagtaacctcaagaggggggggggctcatgcgcatgagagagagggggannnnnnnnnnnnnnnnnnnncatacaccacaagacacatgtactcaaaaatcaataactttttatgtaaatttaagtcttaatttttaagtaaataaatctttaaaaataaaagaaaggggctagaaaggtggctcagtggttaagagtactagctgctcttcctgaggagggggagattttcttcaagggcatgcctcagttgtccaactttcttctactaagcctttcttgcaatggctttaccacctccctaggctcttagcatatagaactttgggtcaggtttaatatccaaaccatgacatatctagagtacagtagcatgtgcatacgtgagcatgcgcgcgcgcgtgcacacacacacacacacacacacatacacacgaggcagtgaggttccaggaaagtaaaggccttttctacttgtggttttctccctcctgtggccctcccttcttttctttcctctttccccatcctacacctgaaagcatggactcagagcctaagatgtgttgaagctttacgtaacaattgaaaatgtagaaggcatgcaagagaaaatgcagcaggccctgggagaaggttgtaggctagacctggagtcagagagccctgaagaggatgccactcctaaacagaggatgaccttgagccaggctgacagggaggagggggatatggttcaagcagaaagaacagcatatgggaaacacccaatctagcctgataactaccaatccaagctgaacatgcctgtatgtgagtgtgtgtgtgtgtgtgtgtgtgtgtgtgtgtgtgtgtgtgagagagagagagagagagagagagagagagagagagagagagagagaggggttgtctcactatggagttcagactggccttgctcttgaggtggttctcctgcttcagcctcttgaccgctcttggcagttcattcatttattttttaagtttagaagtgtttttatttattaatgttgcacttgtatgtaggtacatgggtacctgtatgccacgtcaagtgtaggaaggtcagaaaggtaggtctcagtgatggagctcatgagattttacccactgagccatctcgctggccgcattctccttgcttgtgacattgtcttcctattagaaatgagaaatagaacagagtaggtaaaagcatacattctccttataggaatttgtgaaaatccagctaagtacagagaaaacctgcacagccgttctcaacaatctcgttccttggagcgatggctgcacaggtcccagcagtcctttctgtcactgctcctgtgcccttccttctctgtaattgtattctttcttctcttaaccctgcttcccattttctacatctttagtgattctaaaattgctgtatactcacagcatctcaccgtgattgctaggtcttcagttgtgaggagatttataaacctatatagactatcttctgaagtctaacaagatactgtcttgagttaaggagataattcaaatccctggtaaatgagacagtgaacagggcaagcgggccagctttcttcccctactctcttctgcctctcccttccattcccttccctctctctttttgtgacattcctttttgctttgttcagtgggtgaaagggttatttttggtctttaagaaaatgaagtaggtaggcagagagccatgcattggcctggaagtgagaaagcctgaatttctgcttattctctgaccactgattcagtcattccatagtctgctctgacttttctcaccggtaaacatgggaggagtaggttttataacagatgttttcacactgggtttgtgtgagttttagggttgtgtggaggtgctcttgaatacttgtgtctcatggatgaggccaagcactccctagcactcacgaagcctgtgtttgattcagcacttaaaaagaaaagaaattagatgataaaagaaaaattagatttgaaattttatgaatgaaatacaattatacttttgaaaattgagatagacttcagaggccacaaaatatacccttatgagtctgccttatgaggtatgcccaatctggacattttgcataagtgtaacttatacaatataaacttcatatctggttgcttttatttaatgtaaaagtttacaatttcacccatattgtagcatatgtaagatgcatcttgattttcttttcgatacgtgtgcatggtcttgttttgaggcagagtcttgctatgtagctctcaaatcaaatttgctatcctaccgcttcagcccctcagagctggcatttcaggcataagcctccatacccagtgtcctttattaatttttatttaatcattttaggaaaacatttcctatgttcagataaaaaaattgaccagcctattagacagtgccaccgtagcgatgagctctgtgtccattcagatgtaaaccaattttggcttcttctatttttaagcagaatgctgtgtttagtgcacagggaagcttttaaagctcccgttgccttaaagcctggaaaccaacaccctgatcagccagtctcatgtccctcctctggatctacggtctctagagtcggtcttccttggatgacagaagtggtggtgagagacttatgctgggctgacaggtgaccagaagagatggaaggtgaactggtgagctttatctgtctttggggcaaagctccttgcttttatatccctagtatccccaagggggtatgaggaaggcagctgcggttataggccatagactggtggaacatgtggatgctgccttctccagttcctaagagacagaaaggggttcttgtcagagtcagactccacaggtgatacaaactctttgaggtcagtttgcctcatccagattacatccctgttgtttcttatggaacctagcatgcatgagctgttccatgagtatctcttaaataaccagtgagcagtttattgtactgttgacttaaaaaaggaaaggaaaacaaaacctgcccagctcgcatcatgatgcgtacctgtatcacctgagcaggagactggtgagttcaagcctgcttggttccacagctaaaagacaaacataaacagatgaaaaccaccaccaccaccaccaacaagaaatcaacaaattatatagttgccagatatttcagaaaagcacagtgaagtcttgtgcatacttcctgagtataaaactttatttatggggctggaaacatggctcagaggttaagagcactgactgctcttccagaggttctgagttcaattcccagcaaccacctggtggctcacaaccatctgtaatggaatcccatgctctcttctggtgtgtctgaagacagctacagtactcatcatatacatcaaataaataaataaaatctaaaaaaaggaaatgcatgaaaaaacaatttgtttgttagtttgtttacatgtgtgtgcatacatgcacttgaaagtgtgcaggtctaaagttgatgtcagatgtcttgtttgattgctctccaattctttcctgaggcaggatctcttgctgaacccagaacgcccgatgtggatagcagaggtagccagcctgctctctggctctcctgtctctgccttctacatggggtatcatagacggcccctgtgcctgcctaggttttacttgggttcttgggatctgggctctcctccttatgcctgcacagcagctatcacctaggctccattcacctcccatgcctctctggtacagcaccaaaactaagaacctgacacttgcttatcatcgagctgacttaggttgcatgaattacacatgaactcacttgtgtgttcatatgtatacctttgtacagtttcttttagcatacctgtgatcttgaatggccactactgtactcaacagtcaattaaatcatgactatagacttccttttgttataccttcatagcagccatccttttcccttaatatctgatccttcaattaatttcttcttcatctttgtaattatttccagaatgaagaatttccatcatgaagtatgtttgacttttttttttttaacttagcttgatttcctcaaggataatagaggtggtgtggaccaatacttccttccttttcctgactattagtctgtggtatgcacaggccacagcttgtttcttcagacttgaaagatacaagagttgtttccaggtcctgtctgtggggagaagagctgctatgaatatctgtataaaacttcctgtgtgaaactaggatttcatttctacctgacaaagagcttaagactgtccttgctgaacaatctggtaaagacattcttttactttttaaattttttttaaaaaagaattatttatgtattttatgtataagtacactgcagctgtcttcagacacaccagaagagggcatcagatcccattacagatggctgtgagccaccatgtggttgctgggtattgaactcaggccctctgacagaggcgtcagtgctcctaactgctgagccatctctccagtccctgcttcttttaatttttaaaaggaattgccaagctgttgtccacaaagtgtctaccatttcacactcaacagaactgcacaaatgttttcacacacttgtgagtgtgtgccattataactatgctttatctagctgttatgatagatgtggagagatacatagattccttcttctatgtttctccttccaccaaaaagaccacatgggttttgagatcagctttccaattctcagcaaccatctcctatgattttcaaactttttcctagctctgtgacctggcttacatttcttccctccccagcctgaatcccagagtctttcccagtactttccttattcctggggaaagtcacagagctgaccgagttcctgacagaatctcaactgctagcatctcaactcttgtacactcctttcttttaccttggtgactctcttccatttttggaaagtactgctccaaatgtgttgcaagctcttctcttagatgtcctttccacccgtgagcaagacccagacggttcagcttaaatctcagcaccttcgcaccagggccttctgcatcttccacctcatctcaagtccttctctttcgtggaagggctgactgcttgtggtcattttggcctctggaatagcagaaatcccagttatctagaccagggatcattttgttcttctcttttgatcacttatagtatctatcacttcctaggattaaaatggccatgggttctgtcctgcttgataaatgcagaacaccaggagagaaagaactggaagaatgtgcggtttttgttgtaactctattgaggacgcctttgacttaaaatgttgcagatgcagagcaggttaatgtattgaagaaacaaagttgcttcctgttgccattagctgactgcgtgtactctgctgaatgctcagcctatggggatggttgcttggcactggcagcttgcctggatgtagaatcatggagatgcaccatgtgaaggcattgcaagaaagatacaagacccacaagtaatacaaagagttccctcctatggatggggtccaggctgagtaaaaccgagaaagcaagttgagcacaaactttcatctctctgcgtttcctgactgtgagtgcattgtggcccgctgcctcgggctcctgctgccaggccttccctgcttggtgaactcgattcccaaactaggggccaaaataaaccatctccccctattgcttttgttggcattttgtcaccctagtgagaccagaaactaatgcatgtgtggtttcacattaaaaccaaagtggtaatccccagaggggcattggcttaagcatatacatgtgcctgtgttgcattaagaaaaagaagaggggctggagagatggctcaggggttaagagcactgactgctctatcagaggtcctgagttcgattcccagcaaccacatggtggctcacaaccatctgtaatgagattttatgccctctttgatgtgactgaagacagttacagggtgcttatatataataaagaaatcttaaaaaaaaaaaaaaagaaagaaagaaagagaagagaaaaaacatttccccaggagtgatttaaccaagagtgagcccagattcaaatcctccctgtgctgtctgccatctcccacttgttgtaggagtctgattctatgcctgcctgagtgccactgccttgtctctccctgtgtctgtgtctctcacaaagagctttgctctgtatttattaaacatcacagagtcacatgagggaaggaatgagaggtagtttacagaaatctttaatagaattttacaggggctggaaccttcctggctctaccccaccccccactgcccccagtttacccagacaacaagctgtactacaaacaccactgcacacagacttatcaacctatatccatggcacgtacaacctttatggtggatatttgttttataaggttgtttttaatctgtttactgtttctagtgtttattatcataatacacacacacacacacacacacacacacacacacacacacactcattactcatagggcagaacatggaagagtatataatttaagattaaagctttgcattagcttaggttgtaaaagttgattacatgggaaacccaagacaagtaaggttggctgttacattgttctcgtaaaggcagattaaatgaacaggctaagtacacagtaggctaacaatcttcagtcataaataaccccaaggtgtgttattaactctgattgtgaggtccagcaaaagttctaatctcttagactgttggaggtattcttataataatgtattgccacacaggtattagtatattcatgtggatggaggcatggaagataggtgcagagagataacatgctcaaagacagacagctaacaggtggttctaatcctctgttccccaaaggcttatgacttgtagacttggtccccatctgatggtgtttttgcagatggtggaatcattcggacgagaaacctagtagaaggtggtcattggcaatgtgatcctgaagggaatgtgggagccctggcccatcttttctttcttcttccaagttggtatgacatgaagcttgcttgaccaatgccccctaccactgcaggctccacagcaatagaactgactggccgagaacggaaccatctaacctgtgagccaaagctcagcttttcttctttctaagttgattagctacggtattttagtcacagtaacagggttgcatccaggatgccagcatgtttcttcgatcccacaacgtatttatttgactttgctgagacattgtagaatgttcagggtggcttcaaattagtaaccctcttgccctggcttcgggagtgctgagattgctaggtgccagcatgctagtcacaacaatgctgtttatgctgttttgtcgtaccataagaatcaattcccgtgtgtatgttatagcttaaagttattatctttaaataacttcaggcttgtatggagcacccaagccagagacgggaggaggctggaagagcaatagggatgagacaatgagcgaagggagtccagggggctgtagtaggtgctgctcagcctgatatagcagtgcacttaagattagattcttacattaatagaggtaccagaaaaatctcactaaaagaaattaaaagtccattaaaacaatgcagacaaacgagctagtacaatataaagacatggaagagaggatggatttatagatagagtcaagacctacagtcctatgagtcactgcgattgtgagtgaaatactctgatagtgagttatggcttctacccccgtcttttagaaagcctctccagtgcctcttaaactgtaatttttattcctgattacagcatgtttctcacatctttttatcagtctttaggggaataagtatttacttatttatctaggtactcattttatggtgcaaggatagaatcagaggtcctgctcttgctggacaagtagggtaccactaagctacatcccaggtctgggcctgttttgttaggcttcaagagaccaactgtgaatcaccaagttcctacacacttgcctacatctgctttgctgcctattctctgtgagggagaatgtggaacaccctaggtagagttgctggagggtttggggcttagtgttttgagatgatcatttatcccagtgtaaaagccctgcgtgattccctgttgttctagaaacatttactctcctgctgagcagacacctgcgcacttcaggacctgaagagaatgtgcgggtctcaccagttctttctttcttaaaaaaaaaaaaaattagataatttaaaaaaatgtattcactttacatcccactcaccacctcctccccgccatcccctcccacagcccttctaacactttcccttctcctgagcaggtgggaacctcctgggtatctcccctccctggtgcttcaagtctctgtgaggctaggcactttctctgccactgaggctagacaaggcagcccagctagaagaacatatcccatggacagggcaacagcttttgggatagcccctgctccaatttgttcaggacccatatgaaaaccaagctgtacatctgttacatgtgtgcagggaggcctaggtccagcctgtgtatgttctttcagttttctgagagccccaagggtgcaggttagttgattctgttggtcttcctgtggagttcccatcccttaggggctggaatccttccttctcttcttccgtaagtgtcccccaggctctactcactgtttggctggatcttaccatttcttaagtagacctaggcaatcctagttcctgagtttagtcttgctttcacaactcaccacatagagcagtgattctcaaatcttcccaatgctgtgactctgaagtacattctcatgtgcacacacacacacaataaataaaagcaataattgttttcaaattttgaaacaacctaatcttcctagataagtcagtaggtggttcatgggtggcaatcctggaacccatgtgacggtagaaggaggaattgactccacaaagctgttgtttgccttccacttgtgccttttgacacggatgtccacacagacatcatgcatatatatatattacagacaaacagacacacacaggcataccttaaaaataattaaccattgcaagcctatctcttcatcaactttacacacaagcccatctccttaaaccacaacatttcacccttggctcccaaaggctcgtgtctatctcttaatgcaaagagcattcagtccatctccaagaatccccatagcaacagttctaatattgttctaaagttcatggccaaagtttcctaagatttaaggtaaactcttagctgtgagctcctgtaaaataaaaagaaaactgcatactttccttatctggtggcacaggataagcattccatctcaaggggaataggcggtggtccagaaagatgtgatggggccaaagcaagatccaggtgcatcaagatcgacataaatcatggagctccttgtctggcatttggcaaagaatgcatcatgtggtgatacaagctcccactgcttaggcagacccatctctatggccttcctggccacgcccacatgatttattttgtgtgcgttctctgcttattgccttttttttctgttttagcagatgtttcaatttgctggcattgcttcccatgttctcttgttctcttatcatgtttttgcctccatactcacagtttcttacattgccctctcagaggcggcctataggctgccatgtataacttgtccccaggtcttctttgaatctatgtggaaggaatcattactctgtagtttttgtgttctgcacacttgcaaaggtaacaccatgtggaagatgccaccacacacagttgatgtctgtgcgcctatattgcagagcagtaaaatgaatcctgaagaaacaattttctagtcaggctggtgcaagcagtatgactctaaggtactctgtgttccgcggaaagaatttcacaccctagagtttgttgtgagtgggttctggccagttcttgaaatacacacacacacacacacacacacacacacacacacacacatttttctgatgctaatgacttcttttaaatgaacctaaaacctttagaaaccatacctttctttgctctatttgcactggcttttataatcaaactgagagtttctcaagtctttcctactttgcattttgcttcctgttctcactgtaaacttggccagaagaagccgacattaaccacgccacagtctaaattctggatcgctttgaaatttccttgctcagatcactttgtctatcacctttaaactcagcctcctgttaagacacaggacatggataaaatgtaataaagttctttgctatctatcattggaaacaggaacagcttttagcccatttcccaatagaattcttattttcatctgaaactttacaagagcaatctttattgttgtatcagttattttatgttttgataaagacttcatgatcaaaagcaaattaaagaagtgtatttattttgtgttacagttctaaaggaggagtccgtaatggtgaggggggaaagcagacagagctgagaggtcacatctcagacacatgggaagagggagtgagcagaaagtggggcagggtcataaatctttaaaaccttcccccagtgacatactttctccattaaggctatacctcctaagaagttgcatatctcctcctccccagcagcaccaacaactaaggaccaagtgtctaaatgcatgagcctatgagtgatgtttctcatttcagcaacaacaataacccacatttcttgtcatcatcctggttctttaagctcagtgcactctgcttgtagcagcctagactttatttatcccacttctattttttccaaattcctcttgcaaactagtgtcacagcatagaatcactcagtcaggccttcacagaaatgacccccacttcacagggccagattcgtgtgttagttatttctacgtttgctgtgaccaaatacctgagagaacatattgaacgtagaattatttattttagcccatagtttctgaggttttactccatattctttgactccatggatacttgggtctgtgatgtggcactagatgatgacatcagaagcacatgacagagactactcagcttagcacacattaagcagaaagagagggaggggatgtagacagatgagagctagctagatacatagacagacagacaaacagacatacagacagacagatacatagatacataaatgcatagatatgtagatagatacatagtacatagataggtacatagaaagatagatacataaatacaaagatagatatgtaggtacatagatatagataatgcttgcattatttggattttttccctttatctttttttattttttccatgtagctcatggtgtggtaccacccatattcagggtaggtcatccctcattaatcaaccctctttggaaatactctcacagacaacatcagaggtatgattctcctaatctggtaaacagttttcagtgtggtcatgttggcaatgaagaatctccattatataaggcaaagctttagcaaatactgcatatcagtggtggtacccagtatactgtcagcagtgtgaggatcaccgtggcctgccacatctttaccaatgtttgattctgtcagtctttaaaatttaagatatcctcttcggtatggattggtccctgtggttacaatttgagttttcactgtgactcagcagttaagaaccttgtcgtaaatatcttggtcactttcatgaaagaactgattgtaataacttttgccaattttttttttaagacagagattctctatgtagccctggctatcctggaactcactctgtaggccaggctgaccttgaactcagagatctgcctgcctctgcctactaagtgctggactaaggacgtgctccatcaccaccttgccaaagttcttactgggctttctttgcttttcttattgatttgtagatttttatatcaattaattagttattagcatgtctgcatgacatgtgtgtggagggcatgtatgtagaggtaagagcctgactttgagcgttggttctcccatcccactatagggtccagggagtgaccttatatcaggttgatagacttgagtgtcaagtgcctttacctattggaccatctcaccagctctgatttgtagatttttattatttaattacttattctatatataaattatttgcataaatgtactgtttaatttggataaatgaaatgaatatttctttacaacatagcttgttttttttttttatttttactttaagtgttttttaaaaccgattctcaactgagctagcctaacgttgagattctcctgtctcagtctcatgaatgttagattacaggaatgtacaatgatatccacttccttaatgatgatttgacgggaaataaaagctatattctctgaggccggtgtctgggagaccctgaggccacgtgccgggtaggcatgtgctctaccggagagcagtgaatctcagattcataacaggcttcaatgttgtctgctaattttggattttgataactgcctctgggattctgtttaacaagttcctattttccgcagtgtgataaagatattattttatgctttcttctcagagctttgttttagatgtatttgtttgttgatttatgaaatttttaatgaatttgatctgtagaaaataaaacaagtaagcttgaataaagactttgccacacgtgtattaagaaattgtttcggtgtcagtgattgaaccctggaactcatatgtgctgtaaacaagtgcactgccaatgagctataactctcttctttcattattttaaaattcatagacatacgtgtgtgttgtttatataatgtccggcatgacggtttttgtcatgttgacatatacacatcacatgtgtgttatacagtggtcaaatctagctaataaacaagtgtgttacctcacataattatcacgttgtgatgagaacacaagtgtactgtgtccttagttttcaagaatgaaatatgctgccattgggcatggtcacagtgccattcagtcgacttcttaaacatatccctgtaatcatgtcgttttgactaacatgtctccaccccggctccacttcacaccaggccagctctgataataactattttactctctgttcgcatcaactgtttaaattccacatgtgtgagatcatgtgacatttgtctttctgtgtctggcttatttcacttaacgtcttccaggttcatttatgaatcccaaatgatgggatttccttctttaaatagtattccattgtgcatgcataccacattttcttcatcaagttttattcaacagatatgttgattcagtaccttacgtacttaagtagtacttccataaatacaggactgaaggtgtttatgtaacattgattccatttcgtttgaatatataacaagttgtgggttttctggatcatgtagttgtacttttaattctgagggacctcccaagttttccatgatagctatattaatgtatacttctaccctctgtgtgtgtgtgtgtgtgtgtgtgtgtgtgtgtgtgtgtgtgctatcctggttctaccttctcatcaacatgttctgtttatcttgttttggttgtagctactctaaggataaggtgatagccactatggttttgatttgtactacagtgatggtgagaaatattgaacacctttccacatatattttggtcagttctttgtcttttgagaaatgtctatttttaattgatcatttgttttcttactctttccccattgtgtgttcatggtactctggttgaaagtcagcagggtcaagaaagtgtagatctgtgtctgtctctccagtctgttgtgttgtctacaagtgagtttgtgttggcatcctgtggtttgtcactgtaacgttgtggagtattttgaagttaagtagtacgatgcctctagctttgttccttttgcttgagagtgccttgcctgtttggggtcttttgtgagttttcatgagttccaggatgattttcctccttctgtggttaatgttactggtatttggtagcgatcccactgagcttggactttgctctgactggtggacgctacatgtagcagcatgaaagcacgggatgtatttccatttatttgtttcttctccaattccttttcagtgtaaagatctttcatctctgtgatggtgtcaacttggctggagtgaggattacccggagaactggtaaagctttgtggtggggtgtgtccgtgtcctgaggcatttgagtcattgactgaacaaagaggctcttctggcactgtaggcaggagtcatccattcaactgagggcagtcagatagcatgaaatgtccagaggattttaggtctttgcctcttggatctggggttcacaactcttccctcctggacatcagcacaccaagtttagacttcaggacttataccagaagtactccactgtccttaggacttaaatctctctctgagaattataccactggcttcttttgttctgaggcctgggtgcttggactgagccactgtacagtcttcacaagatataacttcgccaagtggcttttgagtcatttgacttgttcaggatgggaagagctgagggtgaattatgtaggggttggtgctgcctacatgagtaaaatgagacataattactcaggccttgctgggtacgcgaagagatgctgaggaaaggatctgagatatactggacgcccattaaaagccagttgctctgttggataacatctttaaaagtgattctgggagagaagtcttagtggaaagtctaacagctttgggtaatttaacatagctactagatggtggagttaggattcaaactcatttctatattgttttcttcccactctcctccacgccctttctttccatgcacttcccttatctttctctgccttttcagctatcctatcattccttttgtggatttctgaagctctgctcttccttactttctatggaacagaatctatctttttttctttttctttttctttaaataggatctctctgttgtcttggttggcctagaactcactttgtagaccaggctggcctcacacgcaatgattctcctgtttccccttcttgagtgctgggattaaagatgtgtgtcacctattcttactgcatcacagagaagcaacttcccgcccacttcctttcttttttttccatgttttatttttattagatgttttcttcatttacattcctagtttcctctccgaaaatcccctataccctcgcccctccccccgctccccaaaccaacccactcccactcctggccccagcattcccctatcctggggcatagaatcttcacaagaccaagcccgcccactttcttaccctaaagtgttacactttttattgtagcaattctgaaacatgttcccatgtcacttaggtatcgctgtataaggaaccatctaagcagagtggtttgagacagcagacatttatttagctccagtttccactgtcaggaattaggcacatcagctcagtagtactgatctggtccacactcatctgttctcatgcctggggcctcagctgagacgctgggaccatcctacagctggctagcttggtctcatactttgatggagaggaaccaagaaagccaatggaagccggaggctcttgggtctaggcacagagacagtgcagtagcacttgcagtgtcttagctggagctgttgtaacaaagtatcccagactgggtggcacaaacagcaggtgttcgtttctcatagtaagatgcatggaggtcaaggtcaagatgctggcttagtatatgatacagaccattttgtggctcgtgggaagccaccttctttctatgtcctcacatgatggaaagctctatctctttgttctttcacagttactaacccattcccaaggctcctgttctagtgacctcatcatttaaaaatactgttttagaacctatttactcttcattgcaacttcatgtgcacttaggatgtattctgaccattctctctccacatcctcttttaaccctgacttttggttttgtcttgtggcctatttagagccacctgggtcactactggactgacacagtccattggaacatggtgggttcatcagtgagcacacaactgaagccaatggttccctctcaccctgaatcttatttgtagttcagcatcaagtggcaggacaccctgcatcttcccccacccctgcctgcctgctgattggatcttttttgtgttgtcttacttcaggcagctacagctgctgtgagttcatgattgcaatggctgatttgaagctcttctccctatattctggctgttgcattcttcctaccccctctgccacagtgttccttaagccttagatgggatggtgtagatgtcttgctagggctgagcatcctacacgacctcattttaacccaattacttcctgaaagtcccctctcccatataaacatgctaggcagttagggcgtcagcctaggccctttgtggggttcagtgatatcaaggaaaggtaactccatttctttcactgcactgtatgctctcctacatgtcacatgtcacttccaagtttccaaagatgcatggggaaatctctcatcatcaggtagcaaacaatcaattctatagcagaaatgcaactcaactctgcccatttctacttgtgggtaaaatcagatcttggatattgagggctcagttgcacaggactgttcaggcatcagttcagagtccaggcttcaggttttctgaccagctggtcacaagcagcttcctacaactacatagcttggctttgttcatttgctagggcagctcagagaacccaaggaaaaagcacacttattggttcattgtaaggccacaaacgaggatctggatgaagacacacatgggaccatctgacaggtgcctggctgctcctgggatgtggaccagttcttcctcagtttcctcagactccacaggttccccagaactctgaacccttccactggagttttgtggtgatgtcactgcacaggcgtgactgaagcatgggcaactatgtaccaattggactgggcagaaggttatcatctgtggtccgagtcagtgagaaactcagcacaacctgtctgttcagattcttcatggcccctctgtgcagcgtgccttccttcctggtatggggcagaaccccatgtggaatgaaagtcttaggatctattcttagacaaagtagttaagagtgtccttctggtcaggagttagacaggaaagcagaaggttataatatacttttgcttttagtgatctgacctggggaagaaatatcctagttcttacagtgtaccttcaggagaaaaaagaacagagaacagaaaaaaaaaaaaaaaaaagaacagagaaagaggttttgctgaggcctaagttgccccagcattataacaaagacatttaaaaaaaaatctttttagcttagctttaaacctgctttagaaactaaaggccaaaactaaagctacacttactgttctagccaatttggaaatagtaagaaccatggaatctctctctctctctctctctctctctctctctctctctctgtatgtgtgtgtgtacatgtacatgcataccatttgtatgcatgcacacatatattcggctttgtgaacacagagggtaccttgcaggctagggagtatgtggcagagggaagacagtagttagtggcagtaattaattgcactcatgaatctgtatacacacaaggaagtgtggatttggaaattattttcatgaaaggctctctttgacctgaaaggaaatagagtcctcatgtatctgggccacgctgtatggagagacctcagcccatgctttcctttagtggctgtagttcaggattgtgtcgaacatggttcctaccctgcagcctacacagtgatgtgtagagcttcagaggcggaggccagaggccaaggctgcagtccaggctctgtactgattagttgctggtggaagaaatgtttattctttgtgttttactttcccccctcataacaacagaaagcttgtctcctttggttgttagtttctttctgtgatgggtgaacagtagccacccactggaacaggctactgaaaaataagatacccaggaaatgtaaagtgcaaagcctagcaagtatgtagcaggaagaaaatcttcctggctccacattgaagtagcaatattttgtatctactgagataaatgagagacactgtagagctaaattcatctgcaaattcatttgtttcactttggtttttaatgtggccactcgaaatttgaaagttatgttattattaattattattattattattattattattattatttttttttagtttctattgttgtgataaacactgacttagagaggaaggttttagttcatcttataactcccaggtcacactccatcactgagagaagtcaggacaagagctcagggcaggaaactggaggcaggaactaaagcagacaccatggagggatgctgcttactggcttgatctgcctagcttgttcagtctgctttcttccataccccaatataatctgcctagggttgacacttcctacagtggactgggttttcttacactaaccattaacccacagacttgcctatgaaccaatgtgacagaagcattttctcatttgagattccttctcagataatcctatcttgtgtcaagtttacaaaagactagcataacagcacataatttttgttcactaggggcttgcattctatttcttcagacccttcttttgtgatcatgaagtattgtataagtgttggttctatcctgaacatgtatagatatcattgtataggttgcaattccatttttttctaaagcttattaacattcactaaagttttaacataagctactatgtaggcatcttagtttttttctcctgacgtataaagtagagaagatataattcatttatatgagtaaataaaaacttgagtgcactggattccaattatgtgagcatcgtgtccaatagtaggtagaattcttttggctgcacacaccaccgatatagtacaaatcaatttaattaaaacaggggctattataagtatgaaaaggcagtggtattctgaaattagtgcctgtagaaagttgtcttcctatatctttttttctctcaaatttacttctttctcattggcaacattttcgtctcagctctcctgtccccatatatcaaaaacacagattgtaggcatgatgtatgttatctttgctcaagggtaggattcagtttgactttctctctggttttcatctgttgacctagcttgatttttagatattgatcttggtaggcctgggacagtttcaacttcagccagagaagaggagaatttcccagaaagagtgcttcttttgtttgcttaaagaaagtgtatcttaggtcttctttttagatatagtttgtctcccagagctttgtgggctgagtattcagtgacactgggtccctagtatcatcctctgagagcagtgggccctttaagaggtgggcttagtgtaagaaaattaggtcgtgagggctccaagctcatgaatggattagcattgttttgtggtcgtggttcatgggagtggactcatgctggaccttgtggtacaagttcattatcctagttactcaggaggctcaggcaagaagatctcaagttccaggcctgccctaaattacagagtgagttcaatgcttagcctaggtaagttagcaagatcctttttcagagtgaaataaataaacataaaagatgactagggatacaactttgtggtaagtgcttgcttaacatatagcagatataaggcacaaggtctggttctgcttagcacaaggagtcaattgattcctatggagggtgggctgttatcaagagcaggccttgactctcattatctcttggtttcttgtcgagtaatgttccttctgtgttctgggtcccttaacacttttctcccatgttataatgtagcaggaagtcttccccaactcaaccgtgcagtttggtccttcctgtcaccagaattgtgagcttcataaacctccttaaaagggcctcaacccatgtacttcattatagcaatgtcaaatagagtgggaccacagtggtaactaatatgtacagtcaatacatacagtgaaaagctcagaacagaaaagattagggctcaaagaagttctgtattttggccagttttaaacatccaggctaaatgttcatgtcttttaaaagcctacatgtttaaccaatacaccaagaaaatgctggtaaattgggttgtgctgacttgaattttaaggagttagcccttgccccatctgcattagatcacttcccattgagcctgatggctggacttcccatgaatgaagtgggtccaggtaataccaggaaagttcttctggaactgggaatggatactgggagcttgaggatatgtccttcagccttgcagccaaagcctgaaaggaaatggggaagcacaccagttagtgtctctgaccgactgtgtttcagatgttagcataatttatatatatatttcccaccattacatggctccccatggttcacagctcatgggcatggtgatggtaggaacaggggtgagcatcattgcatcattttctgtcattcacaaacaatatgcgaactaaagggatattctctcagagcgatggttcctacatcgcccaaaaaaggggggagggggccaggtccagaaggtgtaaagctcctagtctggtcaaacacaaaaagaaaattcaagctaatgtggtgtgaaaagacaaaaacgcctgttttctttaattctgttgaaatacaagagggcagtatgtggtagctttgttgggtgagtccatttcaaacattcagggagtctgacacgaatttctcaggaaaattgttctctatatgtggctccatcgtctccattgtaatggatgcagcaggcagtggatgtgaagcagtaaacaagagcctttcccaaagatggctcatcaacttcccatggcctgacatcatggagtacacagactggagtgggaaggcacagtgtagacaaacacgtggagcatgtgtgacacgttacaagatgcacaatgtactatgggacatgatggaagtatatctaacctggtcctgacagcttaaagaatccctggggaagtgctgtcctcataggcacttgaagagaaggttggactgggccatgtgggaaatccagggatgctaaatgtctggacctaaagactgaggtagagagacttgcagggtgaattagtgggtaaaagcagcttgctgctggcttgctgatctgtgtttgatccttgggagccacatggtagaaggaaagaaccaactccctcaagttgtactctgaccctaacatgtgcatgcatgtgtgcacgaacatgcctaggcacatacacacacagtaaagcaataaaatgtaataattatcattttaaaaaggtgaggtgaaataagaaacaagaggtctagttctgagcgagaagtaacagtcctggagtgtgaagggtacatgtgtcaaatacttagatcagtggtcagccttcctgatgctgccagccttattaatatagttcctcacgttaaggtgaccctcccaaccacaaaattatttttgttgctacttaataactgttttcttgctactgttatgaattataatgtaaatgtctgtgttttctgatgatcttaagtgacccctgtgaaaaagtcatttgacccgaaagggtcatgatctagatggaggcctgagcccttgtctttcttagggttaattgctgtgatgaaacaccatgaccagaagcaacttggggagtgtcttagttgctgttctattgctgtgaaaagacagcaaggtcaaagcaacttataaaacaaagcatttgattggggattgtgggcttgcttacagtttcagggggtgagtccagcaccatcatgacagggaacatggcggcaggtgcgcagacatggtggtgcagcaatagctgagagcttacatcctgattcacagacagcaggcagagagagagagagagagagagagagagagagagagagagagagagagagagagagagagagagagaaaatagagggagaacgaacagagaaagatagttaagatagatagatagaaagaaagaaagaaagaaagaaagaaagaaagaaagatagatgatagatagatcaatatagagatagagattgaaagagagtcttgtgtgggctcttgaaacttcaaatcccagacccagtgactcacattttccaacaaggccacacctcctaatccttctcaaatagtccagcaattggagagcaagcatttaaaattataagagcctatggataattataagaggccagagcaccccagggaggaaagggtttatttcatcttggagaagtgtagcttgttccctctgggttgctcagtttgttttcatatactatccaggaccagaccacctgcccaggggtagcaccacctacaatgagctagaccccctcacgtcaattatcaatcaagagaataccctgcagacttgcccacaggtcagtcatatggaggcattttctcagttaagactccttcttttccaatgacctagctgtgtcaagttgacacagaaacccgccagcacagtcctataattagatttgcatctgactcatttttcttatctctaaattgaaagggatctcctgctccctgcagttcctttctgctttaatatttcatacattcctctggctgtagaatccttaatcccacgctagcttccagatctcctgggcagcaaggcccaagattataaccagggctggaagagggacgtggactgtagatgggggtgggcagggagaggaagataaatagatgctgtctctttcccattagacgttagtgaaaagaatgggaaggtagcaggaacaagaaacgcgtaggtagctttgccttctcagcaagcaggtagacgacatctggctctgcttctggcatggggaaatgtaatattctcccatttctgtcaaaatgcttaaaggattgcattttcaagtatttaatgataaataccatgaagcctgaaatgtactttaaaacactggggaggttacagttcagtggcctagcattcataaggctctggattgacttccccagccttgcaagtaaaagactaagtacacaaataaatgagtgaagttggggctgtacatatgaaaggagattgattatggcttggtattgttaatattgagttgtaggtacagataaatccaacacataatttaatctgcttttgtgttttgcttgataacttccataaatcagagtgaaaaataactacttctaacctcattacctaaagttctttattattattattttattgtacaagtgtagaatggatcagactctctcttggccatataaatgtcttacaaatattgtattatgaatagcaacagactattttaagttatattatctacttggatgacttaaagtgtttttagactacattgaaattacgtaggtgggtcaaagaaagaattctgtacaaaggaagggacatagactagggaagtcttgggtaacatgaacatgacatgaacaggcttgcagttctgtgctgggtcagtctgaaggaggctttgggtatcgcagatagtcactgggcttggaatcaggtagagtagacagttatatactcgttgaagggtaacatataatacacagccaggcaccaagccaaactctttgtgtccttggtgtcacacaattttaatagctgccttattacttagatataatggttttatgagtgagctagcagagtcttaagttataaaacttgtctgtgactgtatagacatgtaattcccaataactgttatgaagagtgaagaactgaagtccagaggttaggtggcaccccactggggactagaatggctgcatgtaacagggaaaaacaaaagagtgactcaccacagggagagttctttctttctctccctttgctaatctaggtatagttgacctatgactgctatgggtttctaaagctcagggtccttctgtcttttgcttgggtgccaaagccttttagcctgaagctctctgaggtcagagagtgactcaaacaggagtctgttctttccatctcctatgtgggttctgggactagaactcaggtctcaggtttggcaatcgccaacctgctcacacatctcactttatttcatccagtgatgtagggaatggagttttccctcactgtagagacaagaatgtggccatgagtcaggtcatagaaaacttatgtacacatgtttggacagtgctcaaacattgatataacataggtttcctttgaagccagtggcttctctccgtgtctctttaatctacatctgctcagacggccacactgacatgccaaatggaacatgtgccaaacctctttcactgttaagagcttgttcttatttttatatctttgtggcttcaaacttgttgccattgccctgctccctgtcacccaagggctggagaaacgggcatgcagcaccaagcctgtctcaaggtttacttttaaaaatttattgatctgaaataaagccttgaacgatggagcctagcccagccttgaactttttgttctgtctgaacctcttgagtgttggcattatgaatgcgtgccctaactccccatttaggagttacttagttactatcaaaaaattaaactatattttaagtggttttaatttacaattgcaatgatagtagggcattggagctaggagcttgcttttgatgagaataaaaatattttccttctagttatttttgaattgaaccgaagggtgaccgagcatcaaattttaggtgtatgacctaaaatgtgtacaagagttcataggaagaagctgtctccaccagaagctgacttcaggcatcactgagcagaaactcccccacaggcagtatagccacagcaggtcgagtttcactggtcaccctgggaaaggagtgctatactagtgtggtgacaccagtaggctcaagcttcactctcatggtggagttaccactgcagccatgtgcagcagctgagcatgaccggagagtttgacattagagtcataatatccttgtgagcttgcgcgtgcgacataggttctccaaaaataagttttcagggttgtcaaggacatgagagttaagcaaggaagggacctgaaagtgggaaataagcaatgagcgatctttattaccacaagatcttcaagtaagcctgggtttcaggatgagttcagaaaggatgccccacctggaaaattagtcttgtcttccaggagacacagcacttggtcagtcactcataacagacatctctactcccagcccatgttacatagacgttttcttgcattagatattctggctctctcattgtttgccaacacactgcttgcttgctcatgtgtgttgctgtatgaaactcatgacagctgctcttagtcacacgtgtgattctatgctgaacccttgatcagcaaatgagaacacttgaatgattgtagatttctcctctggatgccatttggaggaggagagggggatggcaagtcaagatttgagaagacaggaaatttgagcccaagagactcctataagtcagggcccgcagtattcctgcaggaggagagagtcaggtccactctgccattgagtttccctgcaggaggagagagtcaggtccactctgccattgagtttccctgcaggaggagagagtcaggtataccctgctgttgaagaaccctgaaaggattcccagcctgttcccttgtttatttggctgtggctcagagatgtaggttttggctttggtcttggttcctgtccttggttcttcaaatgagattttgaccctggagggctcaggtccagatgcctatgagggctggtaggaagtaggccaggaggctgggaatggtggtgagagacagtgctcaaactggagcctgagaaccttctgaaaagacatgcaaattaaaagttgttgtgttttgtttttttaagtccagacaagctaaagctaaagctaaatatgtcaaggatatacctaagaactgttcagttaagtaccccagttgtgtatattcacaggtcatatcccataaggagataacctggatgtgactgaggtgtgttgctcacatacgttttaatgcctctcattgatttctattggttacatcagaaaatcaaagggctctgtttcagagacccgtgttacaggatatttgatcacactgtgtacctcaagattgtgttatttactggaaaaacctattcttagttgtggtgttgctcagccttaccacacagctttaatctgagatccttctggttgaatattgtaaaccagattaaataaaatcaaccatgggtcaagaggaagtgaacagaggattattaagaaaaaaccggccaggcagtggtggcacacgcctttaatcccagcatttgggaggcagaagtaggcagatttctgagtttgaggccagcttggtctacagagtgagttccaggacagccaggactatacagaagaaccctgtctcgaaaaaacagagagagagagagagagagagagagagagagagagagagagagagagagagagagagagaggaagagaggaagagaggaagagaggaagagaggaggggaggggaagggaggggagnnnnnnnnnnnnnnnnnnnnnnnnnnnnnnnnnnnnnnnnnnnnnnnnnnnnnnnnnnnnnnnnnnnnnnnnnnnnnnnnnnnnnnnnnnnnnnnnnnnnnnnnnnnnnnnnnnnnnnnnnnnnnnnnnnnnnnnnnnnnnnnnnnnnnnnnnnnnnnnnnnnnnnnnnnnnnnnnnnnnnnnnnnnnnnnnnnnnnnnnnnnnnnnnnnnnnnnnnnnnnnnnnnnnnnaagaggagagaagagaagagaagagaagagaagagaagagaagagaagagaagagaaaagaagagaagaaccatggagagtaagagagtaagagagagtcagggggatggatagagagacaaacaggaagtagaagagaggaacatccagcctgtaggtttttgagatgacatgtgagagggccattcctagtgggacactggctgaggaggatggtcagctgggtgttttctctgcctctctgagcagcaggctttcaccccagcacctggctcctgagtcttcattagtaaaatcgaacaattgagattttcatttacaaaaccccaacagatctggctttataaaagcaagagcacaacagaaaaactttgtcctcatttgttgtctaattcataagatttctgtcattcgattgttctggtgaacccagtaatcacagcgtagagagttgtcatagttagggacactgggagtgcttggtaatagagattaggctcaagagagacaggtagacttttaccctcagaacccatggtgaaaaacccatccatatcattagttaatgtaaacacacacacacacacacacacacacacacacacacacacacacaccactttaagcaaaattttaagaaacaatattttccacattccaaaaactaatgtttttcatcttatttccttttggtgaaaataatgcctatgaactgttaagtttatcttacaatttgccagtgggccacagtgtgaattttataaaaatgtaaaagagatcactggtgtaggggaagggacacgattccatggttaaagcatttgcctgagtatggatggatctctgaaatccacacaaagtgcccagagggcgtggcggctcacttgtgatcccagtcccagtgacggaggaccctggaacaagctggctagcagaaccagctatatttgtgagttctggttttgatggatgaccctgtgtctatgaataacacggaagagtgacccgggatgatttctgacatcaaccttgcatctctgcatgtacaacacacacctttgtgccatatatgcagacctcacacaaaaatgcagagaggacggtgggaacactgtttttgattcttcattaactttttaatttagtattttctcacggtttttccttttcttaccattttttctgatcccggggtctcaggcatttactcagtattcaggtactcactggctgtcatgggacccaaggaaagcatggactttccttcttaaatactccaaatgtcacaggaaaagtgagcatttagacggtaaaacccagtgcagaaaatcactttgctttctacaaaaggcttttcctattctcatctatcacaatggtagtacatctctaatgcaggacaggttctagcttactctgaaagataggaaactatctgcgtcttgagaaagtgatttaattagatacaaaatacaataatggctagaaataatggcaggaagtcataatattgtagtagtagtagtagtagtagtagtagtagtagtagtagtagtagtagtagtaggtaacgacagtagtatttattaagcccttcctgtgagatgataattgatttcagagctggagagatggctcagggggaaaggaagcttggtgattgtctagagcatgcgcactgggaggcttgcaacccatagctccagctccaaggactttgatgctccttcctggcctctgcactcaatgccagccacacatagatctacatttaaaaaacaatcttttaaaaaagcatttaattctcacgtcaactgtgttgtaatggaaatatgctccttttccatgggaaaaataagacaggttaggtgatgtggccagagcctgagggcctggaactcatgactgagtggtttggttccagaccctcggtctccatcctcattccccaaggtagaagggtggcacagtctggcacagtcaggggcaatgcagtacagtctggaataatccggcccagtctggcccagcccaaactcacctttactctatggcatcactgcaaaatgtgcgtggcagatgctatgaggagagaatgtttggttgcgggtatggacgacgacgagagatccagctcctgaatatctctatgtggacactcaccatggagttggtaaaaatgactgaagactcaccttacaggggacagccaatcctttgagtctatcctcatatgtaatattttattcttgagataaatagattatggagcaagctgttacttttcattgaatatttatttatttatttatcaatcaagatatgatcttactgtgtatccctgcttggcctgaaattcactgtatagaccaggctggccttgaactcacagagatccacctgcctcatgttctggggctaagggtgtgtgccaccatacttggcaattgtattttctttttatttgtgtgtgtatctgtggaaggcagaagagggcatctgatcctgtagagttttagacaattgtcttctgtccaacataactgctaggaatcaaactccagtgctctgaaaaagtagcaagtgttcttgaacattaagccatctctgcatcctctatgaatcagtcttgatcttgggaaacagcaagattaggctttgcttttacaatatttcctccttttccaaatcctaggttctcaacattaatgtgtgtgtgtgtgtgtgtgtgtgtgtgtgttgctagtagctgatcttgatttctgttgtgttttcttaggtgtggtccacccatctttttggttttgtttatatagattctctcattggttgagaatcttagtttctcctttctccacttccccagtgctgggattataaacttaaaccattatgcctgattttctaactccccccacccaactcccactttgatgctaaggctcaaactcaggttctcctgctcaggagggagcctttaccagcgaaccctctctccactcagccctccaccgagttcttactagcaacacaggtaactttctatcttctatttctggagtaaagaatacttagtgttcctttcagttgcatgcatgggaggaaccaggcttgcaaaagcacagaatcgagctgtgcttgaagacagaccagcgtggtgacaacaggaaacatttatgtgcttagtatagatagctatgttaagtgctgtttaattatttctttagctacaacatactagtcatatgctaaacacttggcagtgaagagcagaaatatcttcatggggaagtgagcttttaaggaacctgttagagttaagttggtagatgttccaagttagtccccagactctctagtttttaggctgttataaataaatctagacagtgtagaatcctgtgttcattacatatcagttttgtagaaatattaatagttattctgattgatttttatgttaagtataaagctaaaaaaataaaataatatggcccaggggtgtggctcagtggtacaccccttgattaccatctttgagattcttggtttcatcccagaaaagcaataagtggggggagacgctgtctagcccattcatactttgcaaacttgggagatagatatccaaaaatacaaaggcatatgtgtcagtttcctttccacagtatgtctgcaattctgatgtgtagcaaaaataacccaaagtgctccttttgaaaataactgttttcactttcagaccgtacaacaagcatctgctaaggcacgtaatggacgctagacgtttgtgttccctggtggtcagtaatgaattgagaaagtacagaaagagattattaaatgccactgggaactattttgttactagagtttaaaagttatcgcttcggtgaagtaaccaaaatagctcaagacttgcatgtttgaaagtatggggcctgtgtttaaaaatcatatttcagcttttcctgctaccattcaaagttattataagcaagcattagctctggattctgcttctggccttactgcacctcagcagatgggaacacactggacagttagtgaagggatgagaggatctagcaccccgcctcttggacctcttctgactccttctcaacccatgagtctgtgcgatctttgaagaagaaaatggttgtcaagcagttagtttgttgagtttagacttatgaggagctgggattttcagggaattttgggttccagatgatctggatagaaggctcttaattgctgtcatttgatttttgtgtcctgatgtgatcaaaataataacagcaagagacaactatgtaagccaacaggcaggtcaggccggcactctgcctgtgccctgcccccacgcacagcacacatgtgcactcgttcttctcctatcacaggaacatgccagagtgcttctgaaaggtttgtcctcttagtttatccaagggctagaagaggaaaatgatacttttaagtcaacatttttatctggtctttcacctgagctgaggagggagccttctgaaatactatcaggtgaaaacaagctttgggtgtttgcatcttgagactgaacacagttcatatctagattgtggaggcctgacactcacacaatgctgggggactctttgagaatacaaaaaagtcacaagcggacagctagtcacatgggcttgcagagccttcttcaagaagagggccctgctgctaattaactttgtgacagatcccctctgataatggctgtttttcttgcctacaactatgaaagaaaaatgaggggcgaggctagaggatggaaagaaaatctggtatatttctcttcccagacatccttcaagccagcttgaggagttgagttgaggagtcctttctccttgttcctaggtaaacgataagaaacctggaagtgcacaggacatagttgctgaatagatctggccctggctcccttaccccctttagccagctttcatatccacagctcatcccgtgccaggagcgtgcagaaatgccgctccgcctgctctgggtacacagatggcctgccatcaacagattccttttcccctcctactggagttacaacccagtccaccaggtcgatcaacccaggcgtctttcacttccaacaaagaccagctgagttacatgaaatgggcgtgcctggctctctctccaagggtgctggtctccaagacaccttctcccctttttttcctgaagcacggccgcgctgacacacccctccctccgcgttgtcgtggtcccctccccatcccgccccgccccgttttccgctttcagcctccctccctacgactctcccctcctttactctcttctgtttattccctccccctccagccactccgggagctgcccggcttttgcccggctacacctacacttcctcgggcgctgtccagcctacgggtggccggggccggttgggtgcgctgtgcccggggcggtggctgcagagcccttcctggtggccgctcccttctttccctcctcttcgcgtcatgtcgggcacttgattattattgttattttttttcatccctctcttagtctgtcccgtcttcccctcccccttcctttcccaggttgatttttttttcttccccctcttctccgggcttgcccatgagcctcctcgggagctaccggaaaaagaccagcagcgatggttatgaatctttgcagctggtggacagtcacggggactcgagcgcacggggcgcggcggctggcacgcagagggcgaccgcgggcgcggtgcgtagtcccgcccggcagcctccgcaccgcgccagcaccacggacagctcaggtagcggccgctgtggctcagtccttcggcccggtgcacatccccggtccaggctaggagaggctgggttgtaggccatggcatctaataccacatggtgtaacgtctctaatttctttggtccagggagctaagaaacgttagatccgtctggaggctcggtgacattagcaagcacctcttaatctccctaggctgctgaatgcaccagctgggggcggggagatgaggaaagggaggggaggagaagggagggaggggagccaggggagggtggtacctggaagcaaagtggctggtttctccgcccaactgtctgagccgaggtgaaggagaaatgcttggtgcttttgctgtttgcagaccgcttttataccagttgttcccctgatggctgctgttatttacaattatgtaaagctcctctagggttaatgtttcctttctcccacggaaggctttactgggatcaagagccctgtttaacaacacagcccttacactttacacaatgcaatttgtttcctctgttgttggctttgatcttatccttttgcatgctaaaatttcttaaagctcctcatatagggagttggttctaaagtttgtatctgtgtttgcaagtctcagaaaaatgttttaatgagttacagacctctcagactccgtgacagttagcgatttgtgtatcaaaacagtcatccaggaatccctgctgtccaaagacttgtgtaagggctgtttgtgtacttttccaggatgggaaccacaggggccggctctacctttgtggctttaatcctggggcagctaaggactctggtgggagtcatgttgggatgaaaccaagtaggattttattccttgactttataatcacttgtggattttaattgtataatgtctttccttgggctatcattttctatttccgtcttcctgaaagtgacatgaaatactatccccagatatttggttgttctagtttaaaaaggagtttactagttaagctctggtttaaatcaaagagggtactggtgtgaggttctctcggatcatcttatatacagttaacattgttcctagtggactgctgttttcagggtctgggaagtgatgctatgcttggttatttgagctgtgcctgtctagatctatggtacatgaatgctatttatcttctggctctccttcaaagctttaagagattcttgtactctgacccatggtcatttgaggaaacactgtgcagagaaagcagctccatatgaggaatgtgaagacaggagtccacgagtggtttctcaacaatcatttcaggagtgggatttgtttttttttttttaagtattgttacaatatagaagaaacacatttttatgggaaaaaatgtatttcctgggccaagtgatgtccaaacacaggattaaagtagagaatagagtcttttgggcctctggtgggttatcatttggtagggacagccattcgaacacagaagacttagttaggtcctatagttctgaggactggccttttctccccctatcaaatcaggtttttcagtaggtggagagaacaatgaaatgccttgtgaaactgtgggggtgggaagaagatacagttatggttaaagtactgttgccaggtgtctcttcaacttcatggaactcgtgctgtttccagagccccctcccccatccctcttcgaggctccctgccacgtctccagcatctgctgaggggagtgccttggcttggctgcagctggctggtacaactgacgactggatgcatattttcgactgagaacatagtttaagagtgataatgtctggtttggatgagggattagattctgagaaccatatttgtttcctagtgcaactgtatgtcttgcctaagtatagtcttttgtctaagaggctcaaagtgtgtggcccatgctgtgtaactgtatccatttgttagggtatttaattaaactcatagatcatttctaatgcaacagtcatctgcccatttatccggttgattgtgtatgacatggtctactggatagtaggttggttcacggggctttgttctgacaggaatgtttttgaattggaacaataggtggctgttcttgtagaaaatggaaaacttagtctcagtagtaccttacatacgtgtgccaatttatacagaactcttggacatttaccttatttccaagaatgctgtcacacagataagatagtagcacctgtctgtgtgccctgagacttggggagtggagcctcagaactgttgttttcagctggaaaccccgggtttaacctctgctgttcctctgttgcaaaagaggaaacaggtagacattcttaacatgcagctttagctgaagcgcaaagcaatatggccggagttgcacattttctttaccctgcggtttgtgtgctccctaattatggcatgagatgatgatgatgatggagacttgcctaatgaaaaggagctacccagggactctagtcttcttcttctttttttttttttttttgaaaattattgcttttattcaaatttttatttgtgtatctgtgtgtctttatgtgcttgtgtgtgtgtgctcgagcatcatatgtggacataagaagacagctttcaggagtcaattcttcccttctaccatgtagatcccaggattcaagctcaggccttcaggcttggtagcaagcaattttacctcctgactcaccttactagttttgtttggtatggagatagggtctcaaagcatagccctggctggcctagaatttactgtgtagaaagatcaggctgggcttagacatggcctcagcttccgaaggctgagattacagatgtgccgtcatgccatcggtcttctgggctgttttcttccattgaactaaaatgactttctgtgtaggcacagtgccaactgattgttgaaatccaataatgttttctattttgattttccatctgttttcaacggaaagagagacagctgttctgaagattgtaataattttctaactcaacagcttcttaagtgttagagtccagagcagtctcccagtgatccagccaggtccctggcgctggggctgtcctactacactgcttgagaaacttcatatttctcttgtgtataatctgccttctagggaaggttgaactcataaaacccacagaagtcaaattatttagattgagccgattaagtccaaaccaagttcatacctataggctataaaagacagtcctcttaaaatctggaatatattagtgaacttgaaaaaaataaagataatgaagttttatgatttgaatctgaaatgtttctcatggactcgtgtgttagatagtcggtgctgttgggggatgggggaggatttagaaggtactgcttgtctggaggaagtgggccacatgggtacctttcatggctctgcctttggtggtctcacctgggccagccctttccttctctccacttcctggttgctatggtggaaggggatctgctcccagcatatcctccctgccatggtggaccgaaaccactgagaatgtgagcctagataaagcctttgcctttttaggtagattatagcaggcatgttgtaacggtgacgaaaaaggactaacacagggagaatgctaaaatacttattaaaattgagtgggaaaatttgtttggaaataaaagttgactttagtaaatactgtgttacgagtacttaaatgtagtatttacatttttaaaaaaaattatttattttatgcacatgagtacactgtctctttcttcagacacaccagaagaaggtgtcggatcccattacagatggttgtgagcccaccatgtggttgctgggaattgaactcaggacctctggaagagcagtcagtgctcttaactgctgagccatctctccagcccagtatttacattttgacctgtgttttagtgtcctgaaatctatatttggataactttatacttcatagaagtaaacacataggtaacagtcttttgtatttatgtccatgtaggggactttataatttggaggcacatttcatctgtaatttattcaattgtgactaaatatgcacttgttaaggggtaggtaatgagccaaatatgttcagatttccaatagtgagggctgccagacatcttgcacttggaaggagaatcctaggagctgaacttgcctggatgtgagggcagtggctgtgatatcttcagccagttgatcactgtggtggatgtgtctgatctgttcacatcctctctcacctctccatgcacatccttcttcacgtggcttgtcggctaaagaggacaacctccctgacaggggcgggccagtctttggtcagagtcaaggatatacaagtagctgcatgctcctgattggagcctccaaatacgctgtcaaggagaacttccaaagaacagcctcatagcccacagaacacattttctgtccatctacccacagaacacattttctgtccatctacccacagaacacattttctgtctgtctatccacagaacacattttttttttttgtctatctttggactgctctggtcagcagagtcctttctgtgttgggaggaaaaaataaccttcctgttctttagttacaagacaaattcaatccctcttttacatggtgatttttggcgctttgggaatggagatttctcctagcgtggtctcttttctaggccaatcaaatccaccttcttctcttttattttccactcaagtcatttccatgttattattattataatattggagaataattcatacttttgatttgacataacaggattttccctcaatttttttattataaatggctctggaactcatggtttaaaaaaaaaaccctaaagaatacagatgggaacacaatgaaaaaatggaaagtaacctctctcatctgtggtctcttcggctcttgcctcagagtcaacccttatgcctgtttctgggggacccaggtaaaaaagtcaaatttggtggcacacatctgtaatcacagcacgcttagagacaggaggcaggacaagtagcttggagcagactgtggcagaaacaaagtggaaagaaagaaccaattcctcaaggttgtcctgtgacccccctccccccatgcatgctatgacaagggcatgcctgaactcacgcatacaaacaataaaaaattaaaatgtgaaattttaaaggaacattcaacatgtaattagcgtgtatataatatatattatatacatttgtgcataacattaaaattgtactaaaatgcaattcaaattttattcaagttatatatgtgttttataataatcagtaatgcttaatgatagaatggatatgattcaagcatcatgctaaatacatatggtattttttaaccttcataaaatttatgtaggggagaaatgacaataaatgcaggcaagagtgtagagagagaggaaaccttgttaccacttggtaggaatataaactggtgttgttaccatggagatcagtgtggaggttagaagcctaacagcaaagctatcccacgacccagctacaccactcatgggtatagatctgaaggaatgtaagtcaactcactacagagatatttacacagccatttattgctgcactattcttttttttcccatttttattaggtaattagctcatttacatttccaatgctatcccaaaaagtccccccatacccacccaccgccactcccctacccacccactccccctttttggccctggcgttcccctgtactggggcatataaagtttgcgtgtccaatgggcctctctttccagtgatggccaactaggccatcttttgatacatatgcagctagagtcaagagctccggggtactggttagttcataatgttgttccacctatagggttgcagatccctttagctccttggctactttctctagctcctccattgggagccctgtaatctatccattagctgactgtgagcatccacttctgtgtttgctaggccccggcatagtctcacaagagacagctacatctgggtcctttcaataaaaatcttgctagtgtatgcaatggtgtcagcgtttggatgctgattatggggtggatccctggatatggcagtctctacatggtccatcctttcatctcttgctgcactattgttgtgtgtgtatggatggatagatgcagatgtgtacacgtgtgcatgcttatgttgtggtcagaggacaacctcgatgtcattcctcaagagtcttccacctttgggagcagggtctctcactggcccgggacttgactaagttccagggaactatatgtggggtggtaagggaactagcaagacagggagtcgggtcatggggcatagcagtagagggaggaacaagacaaagtgtaatatgtatggaaatgtcccaataaaaacatttctttgtgtgctggccaaacaactagtggaaatggagtcaagttccaagccagtgactagctttgtctcttctccccactttgctattgcatttgccaacctgcccagcctttttttttttaaatgagttctcgggatttgaactcaagtcttcatgcttgtaaaggaagcacttcaccaaccaagttatctccccagcccatatattattcttgatagctatgacagaaccagcctacatgtccacaagcagatgaatggattaaaaattgtgacaccatacacacacacacacacacacacacacacacacacaccccataatattattaatttgtaaagaagaagaacgttcgttgttcattttacagggtgattttattacactttaatggatggaactgaagatcatcttgttaagcaaaaagagagtcagaaccaacgtaaacattgcatgttttccttctataaatgcaggatgtgaaaggaaaaggtggcctgtgatgggagggatgcttaaaggaatgggtggtgggaaataagagaggacaatggccagggcatctttgacacgggatgaggtaactagtaagactgggagaggggtcatggggccagggcagtagagtgaagaatgagaagtaagtataatatatatgtatggaaatgtcacggtgaaagcatttctttgtatggtaaccaaatagctaatgggaaaaaaatgcagtctaaaataaaaagaagctgcttaaggtagagaacaatggttctctcctttgtgcatttgaagtaactggggtgcagaggggttaagctagttctctctggttatgtaggcttcccttgttcttcagggagcagaacactagaaaaatgcccttcaaactgcaaaggaaggcttgtggtgagttttctttgtctgcctctttctctgaggcaaggtggggtaagtgattgaaggaactgcaatgaatgtggttgtttttcaccctgaaactcctccaccatgacagatatgtcgtccttatttacatataacataaaggatctttaaactgcaggaatggcggagaccgagctgaagccgtgtgggatagggccgattaagcctcgagaggacactttgagactaacataattggtgcaggtttctaagatttatggaataatatcttgccaaggacaatggatccctagtgctctcaggatgaaagccacgatgttctgaactggactcgggcagcccagtgtggggtctctgagccctgcccggcagcacttgctgttgatccagactggagcatgctacccccttcttctaagcttttgcgaacacttgccccttagctttgagcatcctattcctgagccatctggatactccgttctatcactgtttctacctttcagatgcttctcggttctgtggcagcctgtggtggacagggtcccagcgccccatcggcctggcctttcctgaacggccggccgtgatgcactgcctggtctgcctcttgttgggctataggcaaagttcagagggaggcctagtctctgccacctttgtattctcttcactgcttgcctgacgaatacttgttgaatgaaaggaagcatggacagattctgaatttttaaaaagggcatttataatggaaagtgcccagccgaacctaaaaataagtatacggctaggtttgatcagaaatgaggccaggcttaaatgaaactgtggcagaaagctcgatcagttcaataatgaacgtttgttatgtgcaagagttccagagaaggaagatggttaagccacatccagactctcaaggcctccctagtgtaacaatggagtaaaccgtttatctgaagactgagttctgaccaaaaaactgcagcctatcgtttgccttacaataaaggtggccttttgtaaacagaaaaataataatttaaaataccctttccccctctctccctcctccttccctccctctttccctccttccctccctccctccctcccatccatatcccccctttgctgtttcttctttcactttctgtcttagtcagagatggcttttttatccacaagcctgagtatttcttagccattagcacggactttaaatcttcaccattttcacgtttcctattagaagttttgcacatcactcttgctatccacagtcaggcatggcacactgttttacagtctgcattgctctccagagctaccttcttttttcctttttgagaaaagctgggactttgaagtaaataaaagaatcctggagataaaatttatgtgtttctttcccgcaagatttgtaagctagggaaaacctaaatcgcagttactttgcatgaaaccattcttcctgagacttaacctggaaattttgatggagtagcccagtgtctatggagtatgtccttcaaggtccaaggaatgagagaatttcatagcttgtgccaagggatctggaaaactcttctgcctctaattgctttatatctcaggcccgaatctagatctaaaatatcttatttcaatgattcatccagatataatattaaagggcattagagatcgaggctaaatgaaaaatgcaactgtgtgtagtagtaacagttcgatggccaccaccaaggacataaccagcctacttattgcatgagtggagttaagtctgcatatgcagaaaatgactgttaatgctctgcagggtggagctgcgcctgagagctggcaggagtgttggtgtgcatgggtagccacctcccagagaactctgctgggacagaacccacattagaatcgggaggtgagtgtgcagggtaataggggacttgcctgagaatgctgaagctgagcagaaacatgcacacatcaatggatggagaagggaaggaacgaataccaccagaccaggagctctcttgtttcccactgccaggccagctggagttgctgcctcccctgagcccacacgctccccagcaacctgctttcttctctgctccgactctagctctgcccctacttacccagccagctggcactgccctggtgtgggtctccagtcccttaggttatcatctaaactacctcttgagagttcttaaaggttacactggcttccagcccacctctgctcaccctacttactaaacagagattccctgggcccagggttgataggtggggatgccagtactgagttttgtggcaccggctgcaggtgcagggtggctggctgcccttggtttactatctctaggtgagcatggggctctgctcgcttccttgcttggtgatggcgtcacagcaagaagactcagacaccagaggaggatgtatgatgattattgggaatacggattcttggtttctatgggaacaaaccctgatcctagaggttgttaaggactgattataccaatcattttttggctctatggactttgtggcaaaatcttagtggggcagctgttcttatttctctttcttctagttcttctttctttctctccatgctctatggtccttccctcctttttttttcttcctcttcctccatccttctccatcttcggcattctcatttctttcttcttctgtttctactttcgtctgcttccttctttcttccactccccttttcctaccttgtctccatccttcctcccagtgagagagtcagtatgtctgggagacttggtgcacaggatgggctgcagtcttggttttatgtgcgtgtgtgtgtgtgtgtgtgtgtgtgacttagacccccctactgtccccctacccatcacttgtggcctaatatgagtgaacaggaacattactttcagatttgggtaagtgcatctgacctccctacagtttcactcgctgcttcaattagcaaagtgttccacccgacaatgacgacctcatgaagaacaatttcttaagtgtcccagaggttgtgtgttcaatcagaggaaagggggggggggcgtgctttctcagtccaagcaaggcacgtgagattacacatccccattttgcccttcctttcccttacctcatctttgcaagaaaacaaaccattgtcttcccttcccccatccatggctgatgcctgaatttttagttctcttaaaatacagatttatgagtgctgtgcatgcgcatgcgtgcgtgtgtggtgtgtgtgtatttgcattgtatacatgtatacacaaggtggcacacaccagcatattatgagtcagcaactctaagttctggctttgccatttataagctacccccttgaagcagtcattcaactgagggatgtccattttatagccggtacctcctcattctctcattcctggacatctcgtgccttcttttttgctacagagaagctggagatgctgaggaggtcgaggtagagaagaccttggcttttatgaacttccctggggctggataaatggctctatggtttgttgaggaagaactctgttttgggaagagggaaggcctggctcactgtggtgggtcaggaatgctgactccgaggagacaaataagcttcacactaacatggaagaagctgacaaaggcaggcagaagaaacaatagcaagcagagggcattcagtggctgcactgtgcttcacgggtgtagtctgagagcagcattgtgaggccgactcatgactgtgttatagtgtgcttgcccaagctgagatagtcacgatgctaactggtcggttaaaaactgtgtagttttacagataagctggtaactaacacaaactcacattagaagtcaggctctcactatgtagcccaggctagctttatgatcctcctgcctcggactactgagtgctggggtcagaggcatgttcctttagagttaaacttgctttggttagcttgtaaagaaatggtattatagcatgttcagacatcaatggcattatcctttgccctcactgtgtcctccattgctctcccccatgcacagagataaactttaaggctgacttgttttagggtgtttgggttctattcttacaaagagtatcatcatgctttagtcagaccggacccgtctttccttgttattcctcagatgggctcttttggaatgagagtgcttactatttcaaagtggagtggaagatagagaggtgtcccacagaattaccttacccactgtgtgtgtagctgctctccttagctgcatctccatcatcatcatcgtcatcgtcatcatcatgtgccttgtcgtgtgtagatcttacagtggggagatggagagagtggtgtgaccatgatgtaagaggaagaagcctagaccctcagacataatgagctgtgacagaggtctgccaaagcgagtcaagatcctgggtgccctgtggctatgagacatcagctggagggacagaaaattcggtttcaatggccaggaaaactgaaaggttgtcttaaaagtatagctgaaatttccacagtatcacctggttttaaaatggagccattgaagcccccaagtgggataggagtctggctttgtctctgaacgtgccaggatagtgctgtctccattacgcctgtcactggcacagaggccggggaattcactgtcttgttttgcgagcagttgtaacagacgcgtgctctatttcacgtctggctttgttttcataccttaccccattgcacagaaactgggcctcttcccctttccctggcccccacaagcctggtttattttataatatgacatatgcatgttcatgaaaaggacatttaaaacaattcagaaaattatataaaagtgaaaataaaaaaaactttctgccagtcctagtcccaatattacaggtttctgcattctcttagaatgtctatgcatatacagaagtatgcaagccagcccacaaacacatggtgattccctcatggctatgtacatatataaataagttcattcactcatgtgtgccatgtagaatccatatttgtgctgcggtaaaagctcaaattttacttaacatgatgtcctagggaacattccccattaggccctaaggatgtaccccactttctctagtgactgctctgatctctatgggtagatagcttttggggataggaatacttaaaaaacgtttttaacgttcacacagttattatacatatttatggagtatagaatggcatttgaatacacatatacaaactacaatggcatctgtaggacaggcatgtcattttcctctgtctactgtacctgtggggaaaacagacttgcaaaccagaagaacgtaggcaggcatacgtacagcttgctgttttgctgagagccccagtaccaactctaatgaggatgcccgtcttcccatattgagtcagagttgagggttgccaaacttcttagtctttgctagtgtgtggtgagtgatagtggttagctccaaactgacattagatgttggtatttctaggaattgtttttgttgttcatgattgctagttatttcgtaagtcacacatgagcgaacagatattcatacatatgtggcatgggagaatctggatgcatttgtgttgattctcacaatctgtatatttttagaagaaaacttagaaaattcggaggagcacagctggactctctgtggtaactatggttgacatttgtcttggcctgatgtctatcaacccttggagtgtgagtagaaaggtttctcttgccttcatggatcttcttggatcatagcttccagttttcttgaggagtgcctcagtgtggccctgaagggatcatggagttgtaatgggcagttgttctagagtctagcttttggcattgttgactagtgtcagtcttggaggactagttttcaccccttagcctctgcttctcaccctgtaaaggagataacacgtctctttaaattgtcaggaagttcaggtgaaaagagtcccagtgagttccctgccctgtgcaggacactggcgaatgtgactgatcaaaggctggaagtgaactccagcagggtggagagtatttgctcctccgagggctctcaaagctgtttagtcccaagggtctgagtcttttctttgttataggcatcctggcatttataacgtctggggtactttataaacacctcgggttgctgtaacttgcagaatacttcctactggcctcccaaggaatcaaccaatagtagtgcttgctatgtcatagaaagttcagcatagcctaattcaggagaaaaattgaaggtagaaggcagaactttctggaagtatgactgtgtattgttgccccatccactcttattgctaggtccatacttgtaacctggcatatgagtaacctgtgaatacacatttaaaccaacttgggctacatattgagactatgtgcttttcaagaaggggcctccctggcaaatttggaaatatctgaatacacttttgttattacaatcgtggggggactgttcctggcacctgctaggttagagactgggattcgctaaactttctctggtgactgatggcagctcctcacagaacacaatctgttcaaatgtcagctccatctggaaagcccaaaagaggacaggagtgattacaaactgaaggtaaggaacctggtgatgggcaagtgtttgggatgtatcaagttgatgatgccacacattgaaaacttacccaaaaggaacttctttggggcttcaagatggactcgggctatgcagagagctgatgtagaagagatgtaagtccatttgtcttgggctatcacttgaaggcagctgagattttacagctttgagcatatggctctgtgttctctggcatcaggtcagttttgtttgttcagagctgaagacagagcctgacccctaactcatgccaggcaagggctcaccactgaacctgacccccaggtcttgttccttttataatgaaaataacgaatatatataatctcaactatcttatctatagtgcattgctcttgctgctatgaggttttgtggattttttagggttttaaaatttgattggtaggcaatagattcatttacttaataaagccttaccaagtctttgcctgtagaaagtccatgaaaacaggatgagtctggttaaagtaaaggcatgaggctagacactgcttttagaggactagcttactcctcattagtctttaaacgaaaactccaggattgtgttggagccagtctgaccgccatatttctaatccactccctttgaagccaggaccttggcctgagagagggaaatagcgactatctatcaagtgtggcagggtacagtatggactgtgtattgagtccccgtcttcatctatggttttcgtcatcatttctacaagagctaagtcatgtacagtggtggatttgctttgagtggattagagtaaggaaatggagtcctacagggaaaggcgagtccgagaatagccaatgagcagtggtaaagcacagataccatgctacaaagttggaaagaacattttattttaaaaggaaggagtcgaatggaaagacagaatagtcaaaagaatcactctatcgttctcatgtcttagtaatcatctttggatgcaagtaacaagttactgaattgtcttattttttttgttttattagattattttatttattttccttccaaatgttgctccccttcatggttcccccactcccagagttcttcaccccatcactcctcccctttgcctctgagaggatgagggtgctccttcatgccccctccccagcatccctcttgcctggggtatgaagtctctacaggattgtgtgcaccctctctcactgaggccaggaaaggcagtcctctgctacatgtgtgcttgggccacagaccagcccgtgtaccctctttggttggtgtcttagtttctgggagttctgtggggggtctgggttagttgatactgctgtacttcctatgcggttgccctcccttcagctccttcaatctttcccctaactcttccataggggtccccgacctcagtctaatgaattgctgttagtatgtacatctgtctcaatcagctgctggtagagcctctcagaggacagccatgctaggctcctgtctgcaagcacaacatggcattagtaatagtgtcagggtttggtacctgcccatgggctggatctcaagttgggcaggtcactgggtggcctttccttcagtctctgttccgtttttgtccctgcatttcttttaggcaggaacaattctgggccaaacattttgaagataggtcagtggtcccttcccttcactgagggccttgtctatctattgaaggtggtctcttctattgtcttatttctaaaccaaagaaagggagttatgataaaggcccacaggacagtgagagcatgacctcaaatggatccaagggcagaactaagagcctgctggcagtgcctctctctcctcacgtttgcttcattctatgttctttctctctataggcaagcttcttttttcttctctgtgtgtataactactccaaagatccctagtttgtgtgttgcaaccagtcctccctgatcatctgtccgtcccaggaggaagagatctgatgggctttaggcatttgtatatttatcacccagtacctgtagtcctagaaacaggtccctatgtttatagatgaaaacaggattatatgtaaaattgcttcttccttttagaaagtgggactaggaacactatctatctagttcctaagtcttaagcaatttttctattgcttccttcatttctgtcttccctgtttgatgccacgaggtcaactctagccccaagtaaagtcagcactcaggcttgaatctgcttatgtctctccctacaatgagaataggcaggcaatttctgcgaccacagaattacttgtgtgtgtgtgtgtgtgtgtgtgtgtgtgtgtgtgtgagtgtgtgtgcgtgtgtgcttgttttaagggaagcgttgagttggatgctctctaagctgtgttctgactcttgtatcaagggagggtttgttatcatccagttatgtcagggctggctatatgtaatttattgcagaattacttataataggaaaatcttccagaatggtctaacatttctccaacaggagagtgattaagaaaataagatatacctataaagttttatcaaaagatattacaataattactaaaggaaattgtagctaataagatctccaaagtgaataaagaagaaataaataatacacattaaattcaaccccacacacatacacctagaaagacatcattgtaaaggtacatctcttattaaaaaaatgaagaaagcagatcaaaatatcacaaaagaatattttggtggtagactaccagtaagtccaactttttgtatgtgttttacttaaatttcaacaatgaatttatcttatagtgctttgttttctatagttggttgtgtaaccaatgttttattgagatagttatatgttcccttgcagttctgcggaacaatacagagagatgcctgccaacattgcctgttcctcccagctgtcatattttatgaatctgacatattttatgtgtttgtaacacacattcaggacattgacaccaatctgtttgacatcagagtcccccggttttccttgatttgagtgcatgtttttatgtcttatatctcatttgagagttccaaattctgccaccacaatcaatattgaacactttcaaaaccacaagaaacctcaacttgctcctttataaccacatccatacctcccatgattctttaatgtattatttatagttaatactaatggaccgggaactaacttcattttagcttttcatctgaagccaaaattctagaaccttagagtaggaaaaagttgtgaaatctcagtggtcacttaaaacgggaacattttcatgtacgaagaaggtttaccaccaccattgcccaaaaccaccaccagacccaggcttttcccgactcctccccagacgctccaacctggtcctctcactctaagtcaggtgtctcgcttatacttcatatcgtctttattcaagtacattcttcatttagtaatggctcacagataaaacactggcctggggatggctcagtgggtaaagtgctagtggacctgagtgtagagttcctgaactcacaagacactgtctcaaacagggtggaaagtgacgacccacaacagaggcggtcctctgtgccttatgtgcctgtggcttgtggtccttgtactcatacccatacctcccacgtatgcctgaggctgctggctctccctcttcttccctaggtgggtggttttagatctgtcatctgtctgtctgtctgccagcctgcctgcctgtctctctctttctcttactctgtgtctcaccgtagagcttgaacctggggcctcaagcatgctaggcaaacactctatcactgaactacatttctggcagctcctgcctgctcttctgcgatagcatgttcgcagtgaggtctgacttatcccggctacagctgcgcttactttgcctagatcccagctctctcccggctccttcctctatcagggcacccgaatctcctttgagttcaccacatttcgtttcttcctttgtgaaggtagtaagacaatgatgagtgctttgagtggctctgagtcagcgctgtgctgtgtgcttgacatctttttgcttcacattgtactttgttatccccagttttaaaatgagaaaacaaagcaaaataaagcaaaacactgagttgagcacagggtggtgtaactaggcaactgcaggtccaagctcagcagcgctgatccctagccactgtccttcgtgcacaaagcagccgagttctctggaaatgccacggattttaaatcttcaacactggctctatgggcctaaagccacgtgcagctctggcccccagcctgatttgaagaaggtcattccttgtctttgatgtggagtgggaactgtcccttcacacactccctgtggtatccatgcaggttgttgctctagactttgccaaaacaaatatctctgaatctatagatccttcctgttgtagccggagaggattgttttacctatttatttcggatgaggaaatttgagtgcagagaggaaccccgttcaacttaccacccttgggtgacttgcaaccttatcgtgtcttcctggcttacctctgccatctctccagacctctcctgtgacgtgggctttcttgacctttcgtcactcttgtcattctgtagacactttccagcctttgggtctgacctcaattgtctaaatttgggtcggttgactggagtcctagagaaattctacacgaaatgcgagatcctactgtgtgccaaggcagtgtcacaaccattagctacgcttcgcccttctccgcattgtctaatgtaggcttgaccgcaagtagcaaaaaccatcctgattatatcttgaacgaaagtaagtttatttctttcttatgtaaatgtctgatctgaatggtgccctagcctatgaagctggaagggtcccaaggatgagtctcattaacccagaggctgtcactttcagcatttttacctaggtggggcagccaatgtgtttgttatttagacagtgtgaaatcaaaaggggatgatacaattcctctcacctagaaacagcttgcaaattgaaagcttacattccattggtaaaaatgtaatttgccacagcaagtcaaagggaaccctgggaaatgtagtcttttattgcaggaagccacctgacaaaaatggatttgggttagaagtctcggctatatcctttttatgccagttctgggaacacaggccctggttgattgatagaagaatcagttctcaggcttatggagttctagaaaaagtgcaaaggggccttgtagaaaatgtcaggattccacaaaggattagaattcagaataatttgtgaggaggttggaatgttaagaacacctatcatttatttgggacttactatttacttgctgggtatttgtttaatacttaagatgcattatttattttttttagggaaatcctagagagtagctgccattttaaccctcaacttacagatcgaatttccatgagaaatcaagtaaatttccaaggtcactaatcagggatatgaagaaatacctgtgtgcttattaagggagcctgaggtcactgcccacttactctgatgccagacaactcggaattattgctcattaacacttcagaaagcccttgtgttcccacaatgattagacccttccaattataacttgaccaggagatgttgtttaaatagtttataagcccaagttgaaaggtcatgtcttctatttgccctgtttgctgagtgtgggctcagatgaagtgaaacaagaccaaattgacaaaaggatgtattatccttctgttccacttgtgtacacggttccttgggatatttttctgtaacaatgttttgaattatattttatttatgtgtagggtctggtgtgtgtgtgtgtgtgtgtgtgtgtgtgtgtgtgtgtgtgtatacatacgtgtgttgatggcatgtatatggaggtatggacaacttgtagaagctggttctcttcttccatcatgtgatttctggaggagtagaactcaggttatcaggcctggtgacaagcacttttacccactaaaccatcctgccagcctgagagcttcctttgtgtgtgtgtgtgagaaaaccaaggctaaggcatctcatagttaaatgaagtagagttgggatttggccacatgttggtgtgatacaaattggaaatcatagtttgctggttgcctcatgtccattatgttagtggggatagttttatgaggattctcagtgtgtcctgggaccaggtaccaggcctattgctggaagatcataggctctgattattcatagttttatttgatgacagcttcgatttttaaattttgtgtctcttttttttttaactaacatggtaggtgggttatgaaactaaaatcaagaatggagtactctatgatgaaaacatacctttatgtaaactggcttttccaacccaaatcaggattaggtagtccttagaaggggtactgaaaagctagatgttgcagaataacacaagtctgtgtaactgctatgtaaagcgttgccctttgggtgtggtgacatttacaggggatctgctgtaggtcaggaaggatttgaccatgcaaagagccaggaagaggcccctgaaaggaaaagcaaacacagattcctaggagatgggaaagagaccagtcactcactgagagttcgagacttggattttagagctcatttgttacagaacaggagctgagttactttgcccacagcaccctccacttccaagcatcagtggctgttttgggttatcttccgcaaaactgagagtcaatgctataccacacttgtcaagttctactttggaactatttggaagaatggccgtgagctgccttgatgaagtgctgctctctttcactcaccttcacctgcaggtgattcactcaatgatgttcctttggggcgtctttttggggcctcaagggtctctgactataagaaaactgtgtggtgctttcaatattggtaatgttttgtaaaaatatttggattcttgtttccatttaaaagccattcaaagagttagtgggtggaaattaaatgatcccatcagaattctaaacctagaatctatagcaaactcagagggttctgttgacagaggagctgagctgttctgaaaacaagggcggattctttcatttacaatgctgcagcctcacagatgtgcatggctggctgttggccatcaataactagcagattgggacattgtctcagtttgggcacttggatttttaatctaatgttaattcagctgttcttattaaggatttttaacaaaccaacaggctctttaaaaacaagcaaaaagaacccaagcctaaaatcaatggtagggatttaaaaggacattccggacttgttccttgcaggggctcagaagagagccttttgatgtgtttcccagtacaatgaaaataccagctgggtaggatgaagagattctcaggtagaacagtgaagcttgagggagctttgtcttctcggtgtattactctttggcagtgagcacactaaaacacccatgtcttgattttttagtttataaaacaatggatatcatttcctatcaattttctagctgattcatgagcaatatatgaccatgttctcttgacaaggaaatcaggttcccaagggctgcccaaggtcacagtatggcggatgatgcagttaatagtcccacccaaatgccactgtgcaggtggttggtactactgagaaacagaacagtgttatgacatcgtcagaacaatgacttagggccttttcagaatgtcccacaaaccagagcaccttgggattatttgatgtttccttccagctttagtctccaatgttctcttgtgcctgagtatgttatgtcaaaggcagagcctagaaaataattatggtttgtttgctatgatctttgaaaatgagaagcacccttatgaagagaaatagccaaaaccattatacaaaatcaccaagtcaccttaccaagataatttctcagacagcataattgagagaaatgtgataattttgttattagggtatgtaactatcacttctttggagaacacaatagcaaaaccatgtcaaaagaaaaagaaatttccagaacactattatactcccaaaatatttaaggcagccatgaagactgtaaacattagatatagccacatttgaaagtggaactagaacacaggctacaaaccctctaagcttgatggcctcttgcaaggcggcagagtgtgttctttttttgccttttctgggcaaagcacagcatgtaaggcatgctacatgcataaccatcatggcagaagatgccgcaagatgcccctgccactgtggagaacgcttgagcaagtgaaaggctctcaaccttcctaatgctgcggccatttaatacagttcttcatcttgtggggaccctgatcgtaaaattattttgttactacctcataattgtaattttgctactgttatgagtcataatgtcaatatctgatatgcaagataactgatatgcgacccctacgaaaaggtcatttgaccccacccccacccccaaagtggcctcgaaccataggctttctaggagaaagggagagtgtgggctaagggtggtttccatgtggtttcctggggatgcaaatggctaaagaaggataaacctgtgaatttcctggaaagagattggtgaaataagatgtgtgatgggtagactggagagatggcttagtggttaagagcactgactattcttctgaaggtcctgagttcaagtcccagcaacaacatggtgactcacaaccatctgtacagctacagtgtactcatatacataaaaataaatatttttttaaaaagaagatgtgtgatgtgcatgactgcagcctccatgtgcatgtggaggggcccagggaaggctacagaggctagatagctggggccagatagctggttagtcagaagttagggatggaaaagactaagactctagctgggagtgggtaggtagaactggaatggcctagactgacctactggttagcagttgggtctataaacatagagagggtttggaatgggggactgagtggtaggaggtgtggagagagggaaatggcctggatgggggttctagcagtggtttttgtatatagcatacaagagaaaggtgagttggggtttggattttctgtgaacatatgggaaactaactcttgggtttccctgtattttcctagtcttgtcccataacttatctgctgtaggatcactgtccttacagggcttaatttaaaaaaagttattagcatatattagttatatatagtggattccatcaggacatttcaaacatgtgtgtaatgtgctttcatcttgttcatcccattgttcctttcttgtgtccctagttcctggtgtaccacttctccctattcttcccattgtcatttttccttttctttttctcccccctttctctttatctctccaactcctccccccttactcatgctcctgagtgaggggtcatctctcaggagctccttacacctgaagaaaatgtctctccctatcattcactgtgctatcccctcagggagtgatgagttcccctggccgcctctccctccgacaggatgttgacagaccaatcttgtgcagatcttgtgctgatatcacagctgccaggagtcaaagaatgcagtggcctcatcactccccgaaggaagccttccgccacactctgccgcttccaccttctgcgttctttttgcctcttcttctgccatagtgtctgagccatggaaggggctatacagattcagtttggctttcggcaatcagttgctctcagcaccttgatcagtgatgagtctctgccataactgctgtccactgcaaaagtgaacctctgaccaaagctggcaacggcactatgggcatacacaaaaatattcataagacagcttgacaggctcttcttgtctagacaaaacagcaagtagcaggttctccctcaggtccgtgactttcccagccagaggcttttgtcgaagcttactgtcccggaagtgttctctctcccgtcgagcaggtcgcaaatccattcatacggcattcacttgctcccgtaacacccttaccacgatcatgctagtaggccttctttcatagctggtcagcagtgtaccttatgtcatctacaaggaagcaagagtggaaagactttcccttcagcagtctgtgttgcaatttctggtgctagtcagcaggcagggagcctctaactcggtttcagcttgattttttttttttttctactatgtcttggaaccaaccagtgtctttagcaatagtcttaccagtctagtgggcagtcagcagtagtggcaattgcttgcattgttgtggaaacttcagttctctcctggaccaacaggccatggggatgtgggttactactactcaagagcaagttttcagctctcaaacacattctttcctaagacccactccgacgttggcgctggcctgtgttatgactgttagagatcgtcttaaggttgttactatagacaggcccagaccattgtgggtggctttgctccctgggcaggggtggggatcctgaactataagggtggagaaatgaagtttgagcaggaagcaagcaagtgggcatgttttccttcgtacctctctgcttttgactatgaaagggatgtaaccagctctcaagctccttctgctgtgacttccacaactgtgaactgaaataaacttggtctcccccaggctgctgtttgttggggtattttatcccagcaacagaaacaaagctagaacagatgggagacttcaataaggagaaagtcttcctcatcagatatttgagcagtttatttaagcaaaattataaaattagcagggggaaagcttgattttttttttacatcttcaaaattaaaaaacaaaaacaaaaacagatttccttgtcttttgcaacagtgtctgagagtctctttatcttactattactatggatccatgttttaaaacataacacctgttttattcagcctcagttaggactttattgatacttacaagggctcctccctggacagtaggagccctttctgttggctcctagctctactgcagtcttccctgatctctgtagctactccgcctctctgaggatcaaccatgttttcaaagagcccttgtttcttttagagggaggtggaattttgaggtcacagtctccacggagggacgcttgctgctcctgggcagcagtatctaggcttttcaggggacagcactacaaagaactttctaagagatgaaatacctcatggatttctaatgaggtagttttcttttatgcctcatatcccaaatcttaattatagctatataactacttattttttttatgcagtcacacacagtgatagaacacagtagcggttcaactcaagatcatttaaaattgcttcatactctttgggaggggtcagtggatttcattttagcacattatttaatcaagtcatctgagactgtttttctgcacggttatatcatccacatgtacttacagaactctttgtttcgtgttgcttttgttttggggagttactttaaaacttacatttataatgatatagaagggttaccatatgtatttccagattacaatttgtatgacaattgtattaaagaatcctggcttatggcagtctccctaccctgttccctgtcttctagatgactccttttagttagagtatgtcttttcactgtgtaaacacgtcggctcccatctcctcgattccttttagataatggagatgtctgtatagagttgggttgtgcctagcactccagggtgaaacaggcagtattttctgagatgttggatacaagctatgagaatggcatcaaggttgatacctagcggagtgtgctgattgattgagagactctccatctttgcaatctctagccggctgtccttgtcctcagatgccctctgctgagctcctctgataccccaagcacaagcactgtccttcctaaatggcatatgcgtcttgttttctttatgtttctcggtgaatagattatgcaaagcttgagggcagcaaccatgccttctccttctgttttcccactgcctcccacagagtctcgacactggaggggctcagggatgcacacaaatcaataacaggcagctccaacagtgggtgcttctttttctttgcttgtatgtgtgtaggtgcacacttatgtgagcacacatgtgtgcaggcgcgtatgcacatggatacagaggctgatggtccaccttggatgtcattattcaggaaacaacttttttttgcctttttttgagacagggtttctctgtgtagccctggctgtcctggaactcactttgtagaccaggctggcctcgaattcagaaatccgcctgcctctgcctctcgagtgctgggattaaaggtgtgcgccaccacgcctggctcaacttgttttttgagacagggtctttcactaggttggtgctcattcaataggctaggctcctgtttgcacctccccagaactggtgttacacaactgtgtagctaacatgactctcgttatatggattctaaggatggagctcagcgctcaggtcttcatgatgcacagcaattacttaaccccaccccacccccagctgccttccagcccagcactggtttcatagacatgcacttgtctctgattctcagaatagctcctggaggtagatggtgatatcccatctttcaggccatgtaatttcagcccagaaaggtttaccctttatataataaccacaataataaccacttaacctctaagggtaaggcacatgtccaaccgaagagggccagcagaaacaaacccaactgcgtatttggaggctctttgcctcataatgtcatgtcaggactttttcctttaaacaaaactctgtgtgtgtgtgtgtgtgtgtgtgtgtgtgtgtgtgtgtgcgcgcgcgcgcgtgcgcgttattctttcatttaacctgtcggtcctttgcatgtatattatggcttccttccaggtttgtgttcttatgggattcttgggtgtaagaactagtgggtctctgttcctcatgacttttttttggggggggcgggggggtgtcttttccttttgtttgttttgactaattctgatgtgttagatttttaaaaattttattactattattatctcttagaaacctgattgttttctattcagagacagaaagggggtggatctggatggaaaggggtagggaggaagtgggaggagtagagggagggaaaaccataatcaggatatagtattcgaggaaaaaaaccctattgtaacaacaagaagaaaagaaggaggaggaggaaaaggagacggagaagaagaagagaaacaacaacaaacagctacaaagtgctgagctggatctgggcacacactgcctgacgccaaggctgatcagccctgaccgcttcccatacgcttccattcacgtggggtggagcagagcacatttgcctatctgactgctgtgcacacactttgcctttggcactgtattcatcctatccatcttccaggagttacaggcaagatgtctgtggttaaaggttgcagtcagggccactgggcagaggtcggtcagcaggcagtcagttgagggcaatgccaagtgcagagagaagacagaaggcacttacagctagccacccgttatacaatagtcatcaccagggcctcccaagcagagggaacaaaacccgtgatggagtcatgcatgttcttgttctacagacaatgctggcattagtggcaagtcaaaccaataccacatgcactttggtgatgtttctatccatacttgccgtgtagttaagtcacgttttccttgggttatatagtctgagactcacaggtttgctaggtgttgggggcatcttggtaagcagataattaagttccttttcccatgcaaagagtcatttgcttcagggccctctggcatttgggatttggatctatgaattaccctcatgggtcagagtgtggactcagtgtctggactcaggcctgagaggggtgggtgtctaatgtggaagtgttggaaggaaggctggggctgtgatattatgctggccctgtgcttggcgaggccagacttctatcagaatagtgatgatggctggtaataggttttctctgcggacgaaataagccaattcaagccaaattgcaaagtacataaagatataaaggcaagtttattgagggcagttcttgggcagatatcacacgaggaggtcagggaagtcgccatgcagacaggaagacagaggagagggggaggagaaagaatgaacatgtatatgctgggcaagagacatgcagagagggagggagagtggtgggggcggagagcgccaaatgtctggagtgtatagtgaagagacttttcagagcccagtccctggtctggaaggttcagggtagatagacagatatgctagccatgtcctgtaataggcagagacggaggccaggtccaatttggtatggtaaataggcacctcagctcctgtccaggctccaaaagccaacagctggtgaagggaaagatggacacttccctttgcagccatttctgctatgtgattcatcttgtgcactgtcttctctgcatccatccaaacatagctgacaactatggcgaggcctgttcacgtccctctgttaaactgtgtgatagcaaccgtgtccacacacggtttagagccgggcagaactggatctgttctgaccctgtatttcttagatgtgcagcctttatctaattatttaacttgactaactctcaatttcctcctcatatatcagacgtgagatctgcctcggcagggtgttgtaaggactagatgtgatttaatgaacgtggcagatggaaagtgcgactaaacgggaagtcctctgtctctctggttcccactggaccttcacttagggctggctcttcttgctaacgtgagatgccagagctgaggctgtgcaaccatgcttccctggttatcagtagcagacagatgagattagaacctcatctgtagaggttctaattcagaaaacatatggacacacacaccctataccacactatatcacacacaccacacacacatgtacattacacccctttacactcatacacacaccatacatatatactatacaccatacacacaccacacctactttacacaccatggctgtgtacatgtttacaaaacatggtttccttctgttgaaggacactgagtcttaccataaacacacacacaaatacacacaccgcatacacacactatttagaaacaaaatttcactatgtagcacaggttggtcttgctcttaatacctagccacaactgagccccttctgcctcagcctcttgaatgttgagattatgggcacccccaccctcgctcggtttagctttgtttactctggatatttggacacagtggcctggcttcattaaagtcaggtcatctggagtcagatgtaatccttgatcctggcaactctttgctcatttgcttgtaggcctcttggctcagtcaggctctatagcccctcaccccccacccctgagcttagtcttcacagctataaaggagcggtatgacctttgctgccaagcctttgaaagcataaaggaagatgctatgcatacagcttcttgtcctacctgtcgcatagcaggagtccagggaaggttagcctccccagaccaccatgcttgactgtgtatagtcatattcacacataggctcggtccataggaatggaactgataactgaaggtaagggctgtgtcaccctccttcagtgtgcacacaggttctgtaaaaacatgacttccttctgttgaaggacaccgagtcttacaaagtgcctggcaacccacgcttgcctttcttcacagaggacactgtgcaagatggaaaggcatagctttcaaccttgcctgctgtctcctttgtgctcagacccctgttgtggttgtcagtggcagcctttgaaatctccgagtctgtgaatcctggccatgttacctgggatctaaaggtaacacagagggagatcagatccctctaatgacgcaggaaacttttcagtcacagtcaccttcctttaggaaggctttgaccttggatttgtcagtgtcagtgtgcttttctctctcaaagggatttgacagtgagcagtctccaaggcttgcagaatggttctgtggggagagggctcatccactgtagcttgctctctgggtccttgcccttagccacctatgtgctgccgccacactgacaaccttcatgcttgcacctggtgaaagtaagactgaaagcctaaatagatgctgaccctaaagacaatgtgctgtgtgcatgcgcgtgtgtatgttggggcatgaggaggttaggcctaggcagctcaaagaagctcatccagaaaaaccatcctgccttgtaccctatcccttgtgaatctgcaggagggggcatggttagactcccctccttctcctgcctattaaagtcctagctgtagttttcactaatttgtgtcttccttcccagcctctgatgctcagcagctccccccatgctgggtgtctggtcttggaagtattcttagatcactcacaccaggctgtgtctgcctttccacttgctgggagacctgccgggcttgcttatttccctttgtgttttagacttttaacaaatacatgggaagcagcaatgtcatgagaggagctcaggagtgagatatcatggagaagaggctagggtgtgtcgcctgtggttttgtttttatgtcctgcttgcggggaactaactatttgtgctccctgaccccccaaagttgtatgttgaaactgttaggatgtagtgttggacatttggagctgaatggatcatgatagcagagttgaagaattggtgtctcgggcaagagatggctcaatggttaagagcactggctgctcttccagagattctaggttccagagattccagcacccatagaatggctcagcacccatagaatggctcagcacccatagaatggctcagcacccatagaatggctcagcacccatagaatggctcagcacccatagaatggctcggcacccatagaatggctcagcacccatagaatggctcataggcatctgtaaatccagccttaggggatctgattttcaattctggcctttgagagaacagcatgcttgtggtgtacagacatagatgaaggtgaaataaccatatgtatgtatgtatgtatgtatgtatgtatgtatgtatgtatgtatatgtgcggatgtataatttatgtatatacatatatatgtattattatattatatataaatatattgattttaaagaaagagactctagaggattcattcaccatgtgaggacacagggaaaggttcccactgtctctcaatatagtttcccccgatcttatactttcccgcctccagaactgagaggaatgtaattctgttgtttgtagggccctggtttatggcattttgttatatcagctcagatagcttaagacaggccctcagtttgctcttctttaagagagaatggtaaagtttaacctgaaaaaaatgtcatgaataatggatgtaagcctgtggttgggacacacagagaatgtggttgatagacaatggccactgttgttagcacagttatacttcagtgtgattgcagctgtttcgaaatgaattgaggggctaggaagatggctcagctgataatgtgcctactatgcaaacagaaggtactgagttcacattcccagctcctatataaaaaccaggctcagtgtcacatgtctgtaactctgagttctgcaagacgtggagatggggaatccccagagctcactggccagcccgctgagccaatcagcaagattccagtgcaatgagagatcctgcttcaaaacactagggcggggcggatgagatgggcctgcagattatggtgtttgtttccaagcctgaagacttgtttgatcttcaggccctacatggcagaaggagagaactgactcttgtaagttgtcctctgacctcttcatgtgcactgtaatacagacattcccacctcatataggtaaataaatagataaatgaatgaatgtaatgaaaagtagagagtgattggaaaagatgcccaatgtcacctctggccttcaaatgcaagtgcacacagttgtacatttgccacagaaaaacgtacactcacaagagaaaagaaaggaagagagaaagaagggaagaaagaaaagaaggaaggaaggaaggaagggaaagaaaggaaggaagggaaagaaaggaaggaaggaagaaaggaagggagggagggagggagggaggaaaagaaaggaaaggaaaggaaaggaaaggaggaagaaaggtgggttagagctttggtttcttgccgagctcagctcagttcagtttaatgcccttctttggactgctcattctgggaagtatagtgctggatgcattctatccatcatgatggatataatccattcattcagcgcttcttgtttcttcttaagtttgtcttaaagctttcatcagagtcatctccataccttccacagcggtttcaaatactgcctgtctcctttgaaggtcagtttgtccttacagcctcttaaggctgaaaaccaccgagtttcctagtctcacctctcatgcctcgaatacatctgaagatgcccggttctgtgaagaaccacagttatgtctgggttgcaatctgtgctgaagacagcatgttacatatgtgacccatcccctaggctccagccttcctccctctctgggctggtttgtgtgtctctgtccccaaaccaggcacaagctcactggcagacttcaggaaacggaagagatactgggatcaagtcaaaggtcaagcagagacagatgcagccttaagctcaagaaggtgctgggtgtaactgatttttctactcctttgtggtattgtttttgtagtcagtcaggttgcagcatgtaccaaaaaggtcacacagctctttcttccatcccttaattttggtaatgatagctgatgatgaaaaaaaagtgaatatggcagataatttattgagcagtgtgtgtgtgtgtgtgtgtgtgtgtttcattattattaatacctaccatctcaaagcagaggttcaaggaggttacacatcacatggttgagcatgaagaaaacagaatggttgaagtgatgatggtggacccttcagagtgtgacttcagcctgatctgatggttgggtacctaggatgctgggaagtaatcaatgacctgtctttctctgcagggctcagtattgggcgtagttgtcatcggcacacatccgttatcttgatagaggtgagaaaacaggctgcagaaaatgtaatccagatggcgatgctatgcctagaattcaattaggggcatgatttccaattaatagaccttcgtgtcaagattgaggtcacgtcgttaatcttgcttttattttaggatttccactgtcatgatttacagctaggctcagccagccttgtcggggttattcgagcataattaaacagggaagacagccagatcagcttgctggtgaggagcagggagagagactgttgtttgattggtaaaggggctggcaggacggggcacaccggaggattccttcttcaggaccattttctgaggcagtggcctcctgcatcccaggcggtgagctctctaagtactgtctggtccagccagcactgccacactcacgtgcagttcaaggtacccttggctgggttgtaaatgtcgcagacagtgtgccttttatgtgtgacggggtactgtgaggtgctccacggggaagacatcttaggcttcctctttgcaacagtcacacaaaagccaagtacacttcccctcccccgcccgaaaaaggatgaaggatgtggcggttctgtgatgtacaccatgccttcatttctttccaatccttgtggtgtttctggttttcctctttgtgtctattacccctgcccaccacttcccacacagtattaggtaggtaagcaagaattacatgtgatgctttttaggtgatggttaggttcatatctatcttttcattagttccttgtcatacacatggctggaggatgccatgtttccagtctgtttgctcacaaagcatctcttcctctccctcccctccccccttcccacccttcccccacttcgtctcactcagcacagggtctccctttcaatccctccatgttcccagcatcccagtgcttggctaacagcaggtactacccagcccagctcgcctagaccctctccatcagactatgcctgtagcaaatgccttttctcttttcctggttatcagggagctgccactggagctgaggctctttgggaaaagtagcatggagaatgtcggtttttgaatgggaagggcctagagagagggtaggaaccacgtgcctgtgatccagcaggagagggtgtgccaccggctgctgtgagtaaagttgaaacctggctggctgtctactcagtctagctaagcacagaagtgcaccagcctgctctttgacaggatttgctcagcgacaggtgtgtccacacagaggagataaggttacatttattggagtgtttcatcaaccacagccatgctagaagttgggcgaacagataatggtagttttctttgtcattgagacccatgaaatgaagcactagccagtcaccttaaactttttttagttacagttatctatgtgtgtgggtgcatgtcaaagagtgcatgtggaggtcacagggcatcttgaggtagagtcatttctcaccttctgccatgtgggtccccaggatggaactctgattatccggcttagtggcccgtgcctttacttgctgtatagccggttctgtttatagttaagtagcagattttcttccaagtgcttgctgtgggtttttttcctgtctgtagattcatcttctgacctctcatccttcctgtttagtcagcacttggctgtgttctgcaactcaccaatcctccctgagcatttttatgtatccgtatgagcaaccacagactattactgggtccaacatccacacttatttttgagggagttagatgctgaaaaactgccttgaaatttccttcaggtgccttggggtgggattgtggcttttgaaataaacactaaagcaatggctctcaatcttcctaatgctacgaccctttgactcaatgtctcatagtgtggtgatccccagccataccattattgtgttgctacttaactgtaatttcgctactgttatgaatggtaatgtaaatacctgtattttctgacagtcttaggtgacccccgtgaaagggttgagaactgctgctatccctgggaaaatctccctgtcagaaaaacctactgtatgaacagctctttggaaatctgctgatccttgtattttgccattggtgtgtcagggcaaggaccaaactgtacaagcagttacacagagtttgtttaaaaattcacattctttatcttgacctccaagccctctggaacgtaagggatactcactcaccctgtttggtggtataagttgatgtcctaaagtttactaatttgttcttacagttttcagcctttgttttcaagacaggatcttgctatctagctcacattagccttgaaccaacgatcctgtccttctacgtcagaggttctcaagctgtgggttgtggccccctacaacatgaggaaccacagtacagggtcgcagcatcagaaaggttgagaagcactgttctaagtgctcatctaacagattataggcacatatcacagctaccacctctactaccctcagttccctattctgtcctcaagtttatttaacaaaatttccatccctattttctactttcaattctagaatctcccctctccctctcctcccccatttctttttcaagacttttttctcttccgttctctaaagatatttatgaactttaaagtatatgttagctaattccaacactgggagcatcttacggtctatttcttggagctttttttattgccgactgactaagctcaaacagacaccacatgaatagtgtttcacgtgaggcttcattgggtagagtttgggttgccagttgtagcctggtttcaaacttggggctcgatgtggctttcatccacaccatatttcttctactactactcttatctcttccccatccattgccctagatgtcttggaactcactctgtagaccaggctggcctcaaattcagacatccttctgcctctgcctcccgagtgctgggatcaaagggataagctgccatgcctggatttgtttgtttggttggttttttaaaaatttaatattgtagatcctcttctgaaagaatggctagtattggttttcaatgaactcttcctatctattttatggtcctctccatcaaacattagtatcccatatgtttactgagcccttactgtgtgccaggtcctctatgcccctagggagatgtgaaaaagtgtgaaactggctctctgttactggagtgctggaggtaggggagttgagtcaattttatgcaaatcagtcctctctgagtcctggggtggagttgcaaagtaatgtgggaaatggcatggggggacatgagagacaaagacactcacaaaaggaggcagggttgggaggtaggtaataactgaagcctttggagccaaccctctgtgaggttctgtcagtatcattcctaaacctaagcagaggccagcttttcctacagagatgctgttttctttctgatgctgtgataaacctgaagtaatgtgtcgaggaaagggtctatttcaactttcagattacagtctatcattgcgggaagccagggcaggagcccaaggcaggaccgtggaggcaggagctgaaacggagtctgtggaagacgctgcttgcttgcttctggttcacattcagtgacccaggcccacagtcctgtgaatgttcccactcacagtaggagtactaattcgcaatcaaaacaatgccacaagagttgtccaaaggccaatgcaatgaaagcaagtcctcacccgaggttccctcttcccaggtgtgtcatgttgacaactgacgcttgactacttcaggtgcttatgcccatgtgcatactatgagggtctgattttgtagtttatggaaacttcttaatagagtgcctagattagctaataggaagtctttctattataatatattataaaaatgatgccatcaaagggttttggaactggagaggacttaggaaatcatgcaattcattcccatagtttatattcccataagtcacataatatttcaaaactggtgatatcaaatccatgtcctagtgtcaaatctgaatgcgagtgttctaccagtagcttataatatgtgccccatgccagagctctacaaaatggcgagcagaacctcagagatgcagaaagttctgcttctgtgaatcggtgttgcttctgaatcctcgcagtgaagacttcccatgcacagcatctagaagttccctgctgtatcactctccagtctggctgttccagctatgagtcagaacaaagtggccctttgtgatgccggctgcattggtcatggctttctccacagcctctgctcactgttatttactgggtgctcacaatatggctgggcgtcagctgagagcagacgttagctcccacagtcctcccacagctgcacgtgggtgcttctttcccgagggtcaggggactgttatatagcagctgtaggctgcatgcccttctagttgcaaagtaagatctgaacctactctgactaataagcagcctgcattttaatactgacagctttgttgagtccctgcctccttgtttggcatagggagcatcaaatactttttgcacaattttacttatttatttttctatgtgacaaactcatgtcatgtgcttagatgcctgtgctctctggctgacttgctgttgtaggcaatccctggcatcacttactataatacctgaatttctaaggatgcaatttaaaatttctgatcgtgttaaaaaagatttattccttcaaatcgtcaatatatgtggtctccttttatcctattgataatatgaggcatgcaggaacgtttttgtttcgagttggtatcattggaagggaataaggaaccctaggggaatatgatgatatgctccagcttatatgggctttgagtaggaagacccaccctcaagtctaagccatctttccccagagttcatattctccccttgaaagctccctggagtaggctgaatggggagcagtggttctggaggccaaagcagtaggctgtttaataaggagtcttattattatgcctacatgacctatttgtttaattgttgggaaatcaagactgaaatatctgtaccttgggataaggaagccttttgtggcaacggcactggactctttgcctttggccaagcttagtagcgaaggcatggtttattgttgggacaggagctggcagtgcacgccaaggtgctttgtggtcttggatttcatccccacacctaccaactttgtgaatgtcaggtgacaagtgtatcatggtcacacttacacacacacacacacacacacacacacacacacacacacacacaggaaaatggccctcgtgaaacgaatgtgaacatgaccagatttctattagtgacattggttttatcagtgttacctaacaagctggctggccttgaatggtaacagttactagaaccagggatagaactttctggaaagaagacagatggaagatgctggggaagtgtctttgtggaagactggaagacttgctgagggggactgatggccccaggtctgtgattgttgccaattgttccctgccattacttctctatccttaaggtcctggactcttagatggaatctcagcagaaggatgctcagcccgcttgcagttagagagccataggtgcggctagaaggttggggtgagcagggttgcttctcagaggccattgaaagacttctgttagaactgttaggcgcagaagggccccacagttgtttagtaggcatgtactgagctatagtagtaaagcacttggttattgttcttactttatatgggctttttaactgtgaagctgtgaggtatggaaaatctagaaaattcagtcatttaaagaccccctcccccccaaaaaaatcactttataattcgatgtcttttgaaaatgtagtgggtaaaaggctgggctctggaacagtgtggctggctgcaaaccctagcacagcggccgtgggagcttgggtaggttcctggtgggtctgtaaatccgccttcctgtgtgaatgggaggaagagtggagcggcctctggagtaatgtgaagattagtgtcactatgaacttgacatctaggtcagtgacaggtcataagaagcatctcataagactgggctagcattgctattcttttacattaattataatatatgagtggctgtggtgtatatgcctataatctcagcactgcggagctggattcttcaggaaggagtttcgggtcaccctcagctgtacatggagtccaaggactgcatggattataccacatcctgtctcacaacccccaaagtatataacacttctgaattctttctctacacttcagtgtttaccagtattgcatataatgtttatattttggttttccttttatgattagttgtagctgtctgtactcttctacaaggtaattaaatggttaattatatgtgtgtatatttatgtatatacacatataattataattagcatatatatgtatatatatacacacatacatacatacacacgtaattatagttactgaatagcagtattaggaatactcaattaatttctttaccattaaaaatatatcatttggggctggagaaatggatcagtaattaagagcattggctgcccttccagaggatctgggtttagttgccagcacccacagaatggctcacattatgtagccccagttccaaaggctctagtgccctctgctggcctccatgggccagtgggcatgcacatgacactctggtggttgagtgataatggcccccataggctcatagatttgaatgcttggtctgcaattggtgggacagtttggaaaagattgggacgtatggccaggaggtgtgtcacagggagggtgtgtgtgtgaggtttcaaaaccccacatcattcccatagctcacttgctccccccacaatccccttcatagtgttgtctcactatgtggattcttagctactgtaccagtgttttgggaaatattaaaaacaacctgaaagttcctgtgctatcaccgggcagagcatcggggccacatgtctccagccaggtgatctctgcagtgtctctgggctggagctcccgagttcctttggtggatcactgcaacgccagcctcatgcaatgaccatccatcctgtggtcagccgccacaacacccagcaacctggtagaaacacaactcttgatgactggcaggcttccccagctactgccagcaactccctgcccatgggggctggccggccatgcactagtggaaaaaaaaaaaaaaacaaaaccctgtttttatctcatggagactttgtctcagaactccacaatgtctccacccagctcactaggttcccactgatgggttgctaccatgccagcaccatgcttcaaatccaccacagcctttgtggtgcacatctggcaaacccacgtggtacctttctctcttgaacccagctgagccttgtgaaggaatacacaatacaaacttagttccaaaacaacagtaactcaatcgctgggcgcaacaactaaagtcctaatctagtaagacttattaaatctaaataatatggtggcaaatcctgacagatccaacattgaaaccaggagacactcatagctacatcttgtcctcacactatccccaaccaaaggagacctaactctctcctgcttcctctcttcctctgttcaacccgaagtccctcctacccacccagtgattggctcctttattcattaggggattggttcacaagaagtcccctgagtatgcaacccctcctaggagagcagaattagcatcaaaatacaaacaacaccaggcccatccacaccataccaggaccacgccagcctgccaccatgtttctcaggcatgatggtcatagactctgctaccctctggaaccatgaaccacaaactaagtgctttcttttataagttgccttggttatgatgtcttttcacggcaacagaaacataactaaagcatatctatgcacatacaattaaaaatatgttaaaatacatcatttgtagtttctggtcactcacaacaatactatggtcagtatgttttatttttttgcctctgagtcttttcatggtataatactgcatggagagtatgccttcttaggagttaccaagtaagactgcacacagttcagagtgtgcaggtgcactgcgtgaactgtgggtggcagggggtgtggtgtgatagtgttccctatgggctgtgaggaccttgtcaacattttccatctccttctttggtgctttgactcagttattacaggtagatatgatgcccattgtcttagttagggttttactgctgtgaacagacaccatgaccaaggcaagtcttataataaacaacatttaattggggctggcttacaggttcagagattcagtccattatcatcaaggtgggaaaatgacagtatccaggcaggcatggtgcaggaggagctgagagttctatgtcttcatccaaaggctgctagtggaagactgacttccaggcaactagagtgaggatcttatacccacacccacagtgacacacccattccaaccaggtcacacctattccaacaaggccacacctccagatggcgccactccctggtccaaggatatacaaaccatcacacccatgaagggcagtctcacctgccttttctacctctcttacttggcaaggcagtagggaccacctggacactgtgccagcctctgaagggtatatttttcaaatggatagtcattgcctccagttttccttaaaaaacaaaacaaaacaacaacaacaaaaacaggttaacgctgatgggtgaacagacagtgagcagttcagggggaggtatcctctcccaagactcacagtgttgtaagaactggtcaggcagtttgtgtgccggatacaatgtggtgatgctgctctcctaagtgctgataatccccagggaaactaatttcagacattcttgggagttacacgtaattggttagtggggaggcagggtatggctctgacatgtgtcttttgtgggcttaggttttaaaaagacaaaatgtcatagataagagtctgcctggagttgaaacagaggcccgggcttttctccttatatggtactcattcactctcacttcttaccttggtacccgcttccatccttggatgccagaggaccctggctagcatgattcccataggtagcatgtaaggtggataatctagtacagagaggttaataaacttcctcgaaaagccagctggtaaatattttaggctacatgggctgtcaggtgtgtcacggccgcacagctccatcatagcagcatggaagtgccactggccagacataaacacgcgagtctcactctgctcttgttttctgtgcatcccatgcaagtgatctaccattaagctacaactctagctccgaattccaataacgttttacttccagacattgaaagtcagccttcagaaaactgtcatatgatatgaactgatgtgccttttaactcttctttcccagacaattaaaatatagggaagtcactggggtttctcagactatataaagacagagaagtgactggaattgccagagctcagtcttgctgtactgaggctactgtttgtttgtttgtttgttttggttttctgcattgtcactttccaaccatgtcatatagctctgtgctcagttaggtttttaaaaccttttttcactcatctagtggagacaaaaatacccttcgcagaatctttacttttgacacccaatgttcctcactaagaaaagctggcatggctacccaaatgagccattatggtgaaagaaatcacacagcgtgcctcctgccttctgtgacatggcttacgtgctgtggttcggatgtatgggtgttataaatgaggtctggaaagtcattctggcttcttcagcattccagggctctaatgagcagagtgagatctgagataccaggagtgaggtttgggtgatcaaagacatttatatcgtttaatagggctgtgtctcagtgttctgtaccagtgtgaaactaagtcagcgagatgtctagatgataatcaacttgatgtcttccctgaaagtggtgaggacggggtgcagacacagcacttcgggctgtaactggtgagagcattttatgcctctctgtcctcagtgtatttaagatgaaaacaggaaatcatttttttatgcatgcatgttcttaaagggagataatctgtcccttttcataggtgaggcagttttgcattagatgcttccataaatctcagacttgatccccatttggtggttgttaatggaagactcctccaaaatccactctagggatccaatgagtttattgggctttgtcccagtgcttgtgtatgtgaggggctacttgtatggctgtgagtgttcttcccccacaggcctttcctttgctcagcagggatgagggtttccctctggttgtatagatggattcccccaccgccaagtcttctctgcttatccactacccaaggctgaggcgcatacaccaggtgttgttgtgctagggaaatgttagtgatcccccaaaacacacaggagccaatcggatgcaactcacagcagggtctttattctatttgagctagctctcccctacccccaatgcaccactgccacacaggacagttttggtggtgggggagtcctggatgtctattagggcaaggcttagtagtaagcagcaagcagggaatacgtgtgtaagcgtctaattggaaagctgctgtggcctttaacataattggctggtgctgggagtcgtatcataaacttaacttcttctcccctctgcattggtggtcattaggaaagggataggcttgtaacctcagggtgcaggtttgttgggggaataacctagagacactggtcttgttgagggtgtaacctggaaacgctggtcttgttggggattagcctagagactggagctaggctcaggttttgttagggggcaactaagaaactaatgctaggtaccagcctgttagtttacctgagttcaaactcaggtcaggttctcttaaaagctttggcatctccgtgtgagcagctgggttcttaggtgagggtctcgtgaccttccaagagagaatgcaacagtccagaaactcagctgggatgatccctggtaatcgggagcagcctaattctttaagatggccatttcttggcttggaggagcgtcacggagaaagagcaaggaaagactattttgatcacagttgtcagaattgtggactagtatggggctggagacggtgggatggggctggttctcactcagatgttagaactgcacacatgggtatgagcggctggctgttctagttaaggtatgagcagctggctgttctagttagggtatgagtggctggctgttccagttagggtatgggcggctggctgttctagttagggtatgggcggctggctgttctagttagggtatgagcggctggctgttctagttaaggtatgagcggctagctgttctagttagggtatgggcggctggctgttctagttagggtatgagcggctggctgttctagttaaggtatgagcggctagctgttctagttagggtatgggcggctggctgttctagttagagtatgagcggctggctgttctagttagggtatgagcggctggctgttctagttagggtatgggcggctggctgttctagttagggtatgagcggctggctattctagttagctgaaactgtcaacgagctgccttcttcttttcgactctgtttctcctactgtagaaattagagtaataggctgggcagagtgacttctacaggtagtcctagcacatggggagctgaggcaggaggatcactgtgaatttcaggtcagccttggcttcagaacaagaccatgtctcactgtttctcaataagaataataaacaatttccagttgtggggaactgttccaccataaacggcctaagtagtgctcctgctgataggaaagtccgggaaatggagaacatttgctcacatgtccatttatttattctccagtattcactgctcttggcaatttccaatacaggaacactttgcaatagattgctaatgatgcaccaggcatctgtagctgttgtgatcaatatggaagagtggcatatttataggcatatacaagagtatagaaggtacttgaaatttaaaacacaaacattactccaaccagtaaacacaaagaaagttatctcatttgatcagagttcaggaaaaaaaatgacaaaaatagaatcctcttccttgcatttgcaagaggcttcgttccaagcccctagaggatgcctggatctctagggagtcccagactctgtgatggctagggattctactaagcaccctgtgaaacaggtgacacctcaacagagaagtacttgacccaaatatcaatagtgctgactagcgctagccacaggggtacaatttcatgtagtcacaagggaagagacactgaagtgtctgataagtcccagcagtgaccgctacacagttctaggcacgatggaatggatatgttgctgtggatagcggccctggcattgtagatcaggactctgtagacccctgttcctgggagtgaatattcaacaacttaccttgccctctctgggtataggcagcactgctaaaactcagtcagtatactccgagagcagcccgcaattgctgggacagtcctagcctgttgaacatgacatgcatgttgtgggattaagagggattggtgttgaatactatagtaactttctgcttttccttcgcaggtgcctcgtctccagacatggagcccagctatgggggaggcctttttgacatggtgaaaggcggtgcagggaggctattcagtaacctgaaggacaacttgaaagacactctcaaagatacatcctccagggtcatccagtctgttagcaggtgtgtacattcttcctggccaggctggtggaatccaggcttccaagggatctggttgcttgccaaccccttattgggctgacatagtgtcaactttgtgacttcattttgactctgatcaatataaaccataatgttaagttcttttgaggctacaagtacagcctgtgggtctcagctcattggtatgttagcaaaggattgccactgactttggttttataaacaatgtggctcacgatgccgtgtctgtgcttataaactctatatggtgtaaggcaaggtgtcaaattatctgataggattcatgtctctgagtggctagagaattagatcagatagtgcacaggcagtctgagggttgaaatggaaacagaacttttgtatcatgcagtccttcaacatttatttagtgggggaagttaatttctcttcccctatatgaaaattcttacatgaataatgtagtagttttttattcttaagaattacaaaattattcatttaatttctgttacaatttgcagttttgaaacagaagtcaattccaatatatttattgacattctaatcttgtttccaaaggcaaacttttctatttcctctgttgtttaatcaggaccttgataggaagggacatagggtcttttgctttttctcagccacttctttctttcttcatagcggttcacaattaggaaagagagtttcaggtggacagacactctgaaccgtcagtgttaggaaagacatggcaggcagttctattccaagactgatagtgctcgtcaaggggcctgtgtggggcagcagcatgcacgggtgggtggtgaggccagaggatgtgggctgccttcccttagtgattagaggaaagagatggagaagatcaaactatgccggaagtggtctgattcatgatgtttaagtgatagagagagaaaagccttgacatatctggattgctctaatgagtgccctctcctccctcacttttagctacacaaagggagacctagactttacttacgtcacctccaggattatcggtaaggttctcatatctgttgactgctctgaggtgctgttcatcctgacagcagatttgtgtaacctgctttctgtctgtgtgacctctcctagtgatgtcctttcctgtggatagtgttgacataggattcaggaatcaggttgatgacatccgtagctttttggattccagacatcttgaccactacacagtatacaacttgtcacccaagtcttaccgaactgccaagttccacagccgggtaaggagctttcccactgagcaagggttgcagagggtgctgttgcttcaccatcggcttggttgaaggtgtttggcccttgggagatatccttggggcccttttcataggcgcatgaggtgagggactatggacactggaccattctaacgacaaaaattcttgttataaaatatgctgaaggttttgcttagctgatagtaattacaagaatttgtgcctgccagtgaaacacccctgaagctggcagctcaaagcattcggtggctgtttatgaggctcagtttagcaatggaactatttcacatggtaaattgctatagaaaaaccacagtttttgaggatgcctttgatcatggcatcatggtatcattagaagctagtgcagttagaacagtacagatagacctttttaagaataatgtatttctggggctagtgagatggctcagaggttaaagtattttctgctcttccaaaggatccaggttcagtttcgtcacctaaatagtggcttatagccacccataattccaggttctaggtgtctaatacccttttctggcctcagaggacacttcacatatgtagttacagatatacagagagcaaaaaaaaatgctcattaaattaaattaaatagtaatgtatttctggcatcctataaatgaaggatagtatgaaaacaatctttactgtaggactggtgatactattttaatttgtaaattaaaattttaatgacacaacgtcttgctacatagctctggctggcttgaaattctcaggataggccatgttggttttgaacttgtggaattgcttttgcctctcaagttctgggactatcagcttgtctttctatacctcatcttggtaatatgattatgaatattgttaatggaaaggtctacaatcaatgcttatgaagtctttacatggcatggagaagtttacatgtaacactacacacacacacacacacacacacacacaattcaagagttctctcggggcagaatacaattggcccagagaagtgaggtaaattgccacaaatcacacagcaagtatgtggcttcctttctttctcccccctgccccaacatggtatttgtattgattatctgagaattgcatgtgatgtaccctatcacactcacttcccagtcttcccaagcccactcccacccttgtgccttctccccaaaaataaggagaagaagtaccaagtgctgtcatttctcttcatggcaaaggtagaaaggtaagaaaatttgtaaattgatatagaagcatttatacatatgaagatatgcttgagtagctcttgtccaaacgctataagtgtctcattagattcatcatgaggggcttttgcctctctagagtcatcatttacagtccttcattattagagtctctgtgccaatcaggaatgtacaaatgatgcatacacatacacacacactcatctacacactctctcttttatacacacacacacacacacacacacacacacacacacacacacacacagtagttttgtataagctatatattctccataaaaagccatctgagctgtaggctggccaaactttcctttactggtcttttttcactaagggggagagttcacatactctagacttttgcaattcattcccctaccacagattacatagtatccttaacccctccccaggacttccagcagagctggtcaaaatagaaccggacccacttacctgtgtctctcaacccttagttacgggaagacggtccccaaatccaagtgttcccttcagctcaggttttgatttggaatatcttctttccaaagagatttgccctcctctctgactgtggactgattggcatctcattgtcacatactgagacagtctgtcttcttggtccttatgctctgggcagtgaggactagaaccacaccttcctgcttccagtttagtgaagggcctggtcggctacaaaatctcatttttaataaatgtaggtagattttcccataaagggtcagtattggaaatagtgtaccataggactgatgttactaacagacttgtggaatctagcgtcacatccccttagattttgtgtttgaatgtttggggtacagattatagtgatgaagacaggttgtatcaggaagattttacttttctgagggttgggtttttttgtttgtttgttttctgtgtcatggtgaacttccatggttttaaagccatataaattaacgggaatcatatgagacaatgaaatagcacttttgtagtatttgcacatttgacaggagataggcacataagacaggaattttgtagtctaaagctagtaatggagttgaccccaaacaagtgtggacaaataaactcacactgaaagtgaggcgctagaatgcgcattcagaattgccaaagaatttttttaaattattattcatagaaaaaatatctacccttggggattaaaagtgccaatgctgtcaatgacattcaaaccaataagatgaattggctaatccaaatcttctttctgaaaattatttattttaaatgattattgatatacctgtgtgagattttatgtatcatgttcataggtgtatgaatcatgagcaccattgcaagccaaaccctggcactggatcctcagaactgtagttacaggtggttgtgagccccccagtgttggagctaggaactgaacctgggtcaccttcaggagcagtatatattgagctaaccctagccctaaaacaagtattcctgaaatgaatgacaatttatgtcatttgtgtattttagatttaggtttgtgtatttagatcaattggtgtctttcagagaacttaacaaggttcttgcactagtaaacaatactgtgggactatatatataacaatgatacagttctaaccactggaagtgtatagtttccttaattacactcaatactgtgttatctagatccaaatctttttaaaaatcatctccagtgttaacgctgtattgatccactgtgtgcatgtgtgtgtgtgtgtttctgtacaggcttgtagctatgtcctttagtatcaagaatcattgttccacttacttcttggcaatactgttggagaaaacaaaaggctgggtgaatagaggtcaactctaaccttgctcagtgtccccaagttctgggcaatggcattcagcattgcccaggcctgcccttctctatccacctatgaaggacagtactgggaaagccttggtagtagtgtagaaaccagtcacccagttggtccttttaaaatcttccttcatatggattatttccaaatctcgtagggtgtattttttgcctttgaaaacagctcagtttttggaaggtgtgttaatgacttggggttcttacagggctcatgactgcaagacaggggcttccctcatttgttacagagttcagtgaagaagtcccagtagctcctggtcgtttctgctttagtttgaggttggtgaggagatggctgcagaggagagagtgataaactctctctctctcaggctctgtacattattatctgggcaggaattaggaagggggaaattattacctggcttgggagccagaggctcacatactacagatacacaaccttctatggactgaacgtctctacctaaggtaaagctcagttaccttacacacgccttatggagctattcttaagaactataggcagggcatcatagtaaagtttattttttttttgttaggatgaaagtatacacaaataataaattttaaaatttaccttaggctcatatctcaaatgttccttttactgtacaagacattcttccactgccttgactcagttgttttcttgtataagatagttatgacagttaagtgttatggtacctgcctttaattccagcactcaggtggcagaggcaggcagatctctgtgattttgagaccaacctgtctacttccagagttagtaccaggacagctaaagccgcagagagaaaccctgtctcaaaacactacactataaaaaagattactatgacaatagcagtatctatttcacaaatgcccttccttcctccttcccttcctccctcttcctccctcccttctccttcctccctcttactcccttcctcccatcttctatcccttccttcctctatcctaccttcttctatcccctaattcctccttcttttattcttccttcttttccttcctctctttatagtactggcgatcaaacccagaacctcatgtgtgtaaggcaaacattctaccaattgaacaccatctttaacctgcataagcagtttttcccatgtgcttattgtcaaagataaatttgtttaataatgcctaacttgaagtaagcacccagtaaatggtgataaagattaacagtggtaataatagactatcccaattggtgactgaaatacttgtcttccataaatgtactaatcaggaaataccagacacggtgggtcagcctgactctctgttatacttttggctcttgtgcttggcacacagcttagaggaaggtcaatattggtggtgtccagctccagccctgctgttgtcttggcctcttccagtatcatggtgagcctgcgactgccatggtattctctgataatcagtgagtccagcagcattcagggagataggttaacaaagtgtcacacagcctagggccatacacgttgtataaagtgtggcctggagagtcacagaaagctggcactgatcagattcctaatttggtgatggtggggtgtttatggcttaatgtttttcctactttagacagagtacacgtttttttttttcttaaaaatgtctaattatgtgtttgcctagtgccatgtaattatatatcgaggaaagatataattatggagtactttaaattaatattatttccttgattgatttaatgatcctagagctgttagcttattgtcgaagaacaatggagccagcttttagctgagactcatttcagatagtgacatgcggtatgtgggtagttagcatatggttttttaaatgctttaaatttaccttagaagaaaattttcttgtatttttcactctgctataatgtaaaaattttccaacaaatttgatctgtctatcctttctcaaggatatctgtgtagaagctggtgagatggctcatcctttaagagcagaggctcagggttcagctcccagcactcacgtgagacaactcacaacctctggcaatacaagctcaaggggatcttatgccctctgttggcctctgtgtgtacttgtgcataattatgtaaaacatgttcataaataaaaatggaataaatcttttagtaagatattagaaaaatcctattacaaaaagattgcaaagtaaggtttatttctttagcttttgttcattcattcattcattcattcagtaagtacctacccacctaagacttagacacccgactttgaggttacaatagggaggagttacattttcttttgtcatggaactcagtaaccagggagggagacagagcagctgacactaaacctgacttaatctcaacagcaaccctcaatattcaacttgcattcaacacccaagagaatggaagcttgggaaagtcactaggttgtcatggaaactgcaacattaaacacaatcctgggacctggagagatggcacagtggttaagagcactgactgctctcccagaggtcctgagttcaggtcccaggaactccatggtggctcacaaccatctgtaatgggatcagatgccttctggtgtgaactgtactcatatacataaaataaatatttaaaaaaacaccctgaatctttaactaataaaaactggaacgggtaaaaattgaccagggcatggatgcaaaggagattggttctatctatgagtgtcagagagtccaggataagtgaaaacatgaaattgggctttcaaagggtaacaaagttttccaagagaaacaccaccaacaggaagcagcatctacagatctgtattgtatagccctggcaacaacagccattctcccaatttttcaactgttttattctgtaagtcatttctattccgtgagaaaacatcagtggagcagacttgagaagtacctagtagcctggatagcctgacttgtgttgggtagaagggttagccactgtggagtttaacctgatagacctgagttgctacctccaggaccccttggtacttatgcgaagcattcttatgttttgtttagcatgctatacttgccgttctcaagggtatagaaaaatgggtaacctggaaagtccttgtcacctagtcattgtatagaaaagggggctccagtagaacagatagggaattctgcacagtgtccagccagtgctgccaaagttaatggataatgctcaaaagacctgggctgagcagtgtggctatatagatcgcttacctttgagagtaaaatttctcatgaacaaaattgtcatctaatcaatactagtctttttggattgtcaacagattaggacaagcagtgttatagtggatcgctaacctgtcaaatatgtatgttaaaggaaggtgggaaatagttcccctgaggagaaaactaagacatgtaagccacccttggctctctctgcaggacttttcatgttgtcaggagagctgagatgcaatagagagcacagagtttataagaaacatctagaagaagagtactagaaactgaattctgtgatacctaaggcaatttaaaaaaatccaagcattagtgtaaatgatctagttaatttaaagtgtatttctaaatatgttttcatatcttcagcagaaaggaattctttaattaaaacaaaacaacaaccaaactaacaaaactactgctatattgagccaggctatcccacctgtaatcctgtttctcaggaggctgaggcgggaagacagtggattcaaggctaacctgggctatgtcctgaaaccctggattacaaagttggtgtcgtgaagctcttccccttttggtatttacatcccttttacatctctgcctgtctgtgtcaaagggtgacgcagtgtcacttctagaaggttggtgtaactcatgattatggagatctcaacaaagtatggcatcaagtttgtctccctgcatttagaccctgttccatacacggagagacgacaggataccacttccagaagttctatgtgacatgtgcttatggagatgggaggattaatttcttttctccattcctttaggtctcagagtgcagttggcccatcaggcaggctccaagtctacacaacctgtttgctgtgtgtaggaatatgtataactggctactgcagaaccccaaaaatgtctgtgttgtccactgcttggtgagtgatctttgttccttctgctggtgggattttggtgaaatatggaccagaagggtaatgcctgagcttagcagcatttactgggactttacttagagggaaagcagtaccaggcagataaaaatgatggaagaaaagaaatgatgtattagtgttaaaacctatcttatttttggcctttccctccctaatcccctaaagaaaaaataattattaaaggaagaatttattattcttggtggtgttttattttgttttgagatgaattcatactgtgtagtccagtcaggttctgaatttgtggccatcatcctgcctcagtttcccaagtgatgggattacaggtttgagcacagtaactggctttactcttgatatttgagtaaaagtaggagaggtctgtgttcacaggccaattaatgcaggggttctaaaatgtgctgcgtgtcataaaagaggaaggaaaggagttgtgggtacacaggtaaaaatgctctaagctttgtatgagtaaaatggagataaatgctcttaactatttgtgtttaagtaaaaataagagacagtgacatttattcccatggaagtagtttcatggaccagctcgatttccaaatgattctcgaagggatggctaggtctttgccttgggtttgctgcagcccctttcctcagctcttcctctcaggcctcttacctgtcccttaaaactcaactttcagcaaaacccttccaactcttgagtaatttccatagtacggacatttccactgtgcatctaaacatcgcctgcggcactgaatgcatgacatcaccctggccgttccctgcccgtttcccactggcctgtcctcttgcagaaagaaactgccactgaactgtaacacaaaaggttcgagcaagtggctgtgtgcatgaacacagggagtcgagcatcagcgctggacatcgttctgtcttcaaacatcagtccgtttgtgttgtggtttgttcttctgttttgctctgagggcctccaggttgactctcccctccgtaagtgccagctggctggaacagaggagacagttgaagaatgtttttcatagttctatttccactcccaaattcttggcaagaatgcaaagcacttggtatctgtaagcatgtagggtcagatggataaaatggatacaaatgtatttaattttcttaactacttgtgtttaaaaaaaaataagagaaagcgacaattatgcccctgtgggtagtttcacgggccagctgtattaaatgccacggggcagggcttggctttcaggggcacattccatcccctgaagaacagcttgcttttaggcctaggcagccttaagtgtaatgaggattttaacttaatttttctttctgaaggtttagagagatggagccaggcagtggtgatgcaagactttagtaccagtactttcaaggcagaggcaggtggatcactgtgaattcaatgtcagcctggtctataggacagccaaggctacacagagaaaccctgtctcaaaaatcaatcaatcaatcaatcaatcagtcagtcaatcaatcaaaagtttagagaggttcgaggctttccagctcttatactgcaatcacgactcaaaaattcaaggctttgtggattcatctggggatttgattgccatgctcactacagttggtcaccctgaaccaccctttgtagtccctagctttctgtcatcatgtgcaagttctagaaagccatgaagaggggctggagagatgtctcagtggctaggagtacttgctgatcctacagaggacccaagttcattactcataactcatgtctggtggcttacaactgcttgtaacagtagttcctaggatccagtgtcctctcccaacttaggtaccagccatgcatgtggtacacaaacatatattcaggcaaaacatctgtgaatataaaaataataagcttttaaaaagatgccatgaaagaacctggagagatggctcagtggatatcctgtcttggctggacttgactgcagcatcaggcttcaggcatcttacctgtgtgatcatgctgaagccccatggaaaaacatcagaggccgatgatgagtgtctggaggacgtgcaggccagctgtcacctttatgaaagtcttgggctgcagtctgacacctattacagaagctgctggctagttatgggcagctgtgaccctctgagtacccccctgactctctgaggcatggatttgattcctttctttccaaggcatggagtcttcccaggcagcatcaagtcaacagctgtgtttggagacagagtcatcatctttcccattagtgctatttctttttctttcttccttcctttcttcctttctttctttctttctttctttctttctttctttctttctttctttctttttttctttttctttttttttttttttgattttttgagacagggtttctctgtgtagccctggctgtcctggaactcactttgtagaccaggctggcctcgaactcataaatccacctgcctctgcctcccgtgtgctgggattaaaggcgtgcgccactacgtaaatgaagatagttccaaggatgtgagggaggtataagtagatacaaagcgggatggggggtgaaaactgtataaagaggaagaaacagagattaaccaaggactgttgtctgtcaggatgttcttagcatcacttacaaaggccatgcatgaatgagtcagatggccttgaccagtctgggaaaaagactggaagctatgctctagcccttcagtgccctcctgtgtatatcatagatgtatttaaaataatgagcatatatcagtcctttaataaaaagtaaaacttaaaaaaaaaaaaggtccgtatgatagataaaatgagcaaacacacatctaagagttacaattaagaatggcaacgaggctagttctggagagaatgacgagtcaggaaagtattcctcacatccgaaacccccacccctttctatgttcagagcagggatagtaaagtcttgaggcacgtagtataagtctaaccctttactgcagggggacagatgtcaggctggcagggacagctgatgagctgaagttggcaggtattgaggtagtagaatatgcaggtttaaggtgccccaaaattagcccattttcaggacctaaattctgtgacaaatttctgacagcatgtggagaaatagctatggctccctgccttcttctgaggaaacacaaagaagaggagccaaggaagcaaaggaccctcccacccctgccaccctgcaaaactacgggtcctcaggaataagtcaaacaagtcattagatataacttaaaagtcatagggaaaaaagcccacagactcagctgagcacaaggatcaaaccaatgagacattttgcagggaggcaagtagactagttgggaaagtttacggggttcctgcttgagatttctacatttcttgtggctaagacggagtaagctgggacaggttatttaattttcagttgggttatagctcaatatctgcttggagtagtgggtgattcatagatcaacatattatgggtgttgtttagttatgttttaaaaaggaatcatcagctttggtgaaaatatggaaggcaagctttatcagttctctcagaattgggataatcccagaatgaacctggatttattatttatttatttttcttaagttcttataatgagctggagagatggctcagtggttaagaagacaggctcttccagagcactggagtttggctccaagtgcccacatcacaactgtctataactagctccaggcacctggacctcttctggcctctgtaggcccctgtatgtgcacacgtgcatgtgaatgcatgtgcacttgcacgcaaatgttttgaaacaaaaattgtttggttgtttaacaaacagtgtgaaacataggaagaacatgtagccagatctgaaataattaaacataactgtttaccttaaagattgctctgctgtgataaaacaccacggtggggtttatttctaattacagttgttccatatcacagtctatcaccgagggaagtcaaggcaggaactcaaacagggcaggaacctggagtcaggagtgaatgcagaggccatgaagggagcgctctttcctgccttgacttcctggcttgctcagcctgctttcttataccattcagcaccagaagctatttctcagcaaatatatgcaagtagaatttgttttcctgagcttcttgggtgattatagagtcagttttataaaagtctttccttgatgctttgtgattttttttttttttttttttggttttgaaatgagcaattctgaagtaaaaggaaactcgcaatttggagttctctctgttctctctctctctgcgagcaggctttccctgcaatggatgtttctgatgagtttgtgggtcttccttgacaggatggacgggccgcgtcgtcaatcctggttggtgctatgttcattttctgtaatctctactccacgcctggccctgctgttcgattactctacgcaaagcgaccaggaattggactgtctccgtctcacaggaggtacagtgatggaggcatcgggctggcacatgcgtgatttatgtagtactcggtgctgcggaaggtctgccttttgggagctctcttttagattctaattggttgctgttatcctgaactatgataacaaagtaaaatggattagaatgttgggttttcacatgaaccttcatttgaaagtctgtggctttaaaactgaaggggaatgttaaagaatgcctaggttttctttgtttgtttgtttgtttgtttatttatttattgggacagggtttctctgtgtgcaaacctggctgtcctttaactaactctgtagaccaggctgacttcaaactcacagagatctggctgcctctgcctcttgagtactgggattaaagggtgagacacctctatatcctgtcctgctttcttcatttaaaaggagaggaaagaggagtgagaactaaaccaaggttatgctgtgctaagcaccagtctgaaaacccactgaacatggcttgaccattctccccagcccggctcccagtgccttccagtttcatgctgtaggtctttattatgatgtgctggtagttgggtatggtggcacacacctttaatcccagctcttgggagtcagaggcaaggggatctctataagtctgagaccagcctgatctacagagcaagatccaggacagccagggttacacaggaaaaaaaatatacactgatgattactatataaaaatgcaaaaaacagagagaataggtgttttaaagcttaatttttcccatgactaagatataagtctgtaatcaatataggctaaaaaagaaaatgtaaaatggctttaaaaggaagcccaattttaggtagctgattaattttctttcctagagttataattagtttctctgttcttacttaaatctttggataaaattcaaattttggataataaattctaaagtttatccaactctgccttttgctgacatgcttaatctgctagatttaataggaatagatgctcagatatcaggctagtgaagtgttcccacaagcctttgactgcatacacaccctgctgttggctcagcgtgtcagtgaaaataagctctttctcattagaacaagctctcttattcttgttatatatatatgggtgttttgactacatgtatgtatgtactactcatacatgcctggggcttctgaggtcagaaaaaaaggtgtcagacccatttggaatagaagttacagactgggtgagcaactaaattggtgttgggaaccaaacctgggtcctctgtgagcagcaggtgctcacacccactgagtcatggctccagccccaatatacaagctgtcttaattgtctgtgtttccctgtggtagtttatgttaggaatgtgcagaatacattttctaatgcaatttaacttgcaagaacaaccgcagaaactgtcaatcctcctgctgcgatggtctcacagaatggcggtcttctgtttcaggtacttaggctacatgtgcgacctacttgcagataagccctaccgccctcacttcaagccactcacgatcaaggcaatcactgtcagcccagttcccttcttcaataagcagagaaatgggtgccgcccttactgtgacgttctgattggagaaactaaaatatattcaacgtgcacagactttgaacgaatgaagtaagtcaccatgttttctcttcttgcatatttaattcctgtgtgaattgcattcctcctgcttagtgctgtgatgggtgacaatttttttatagctcgacatagtttaatcaaagatgagcacagctaatctagggatttgtttcctgtgtagacaggagagtgtttgaggtgtctaggatgaggggagtgaggtgggcacagaggacctgcacatttgaaaaggagactctgtgatttgggtagatgattgttttagtacttttaaattgatgtgatgagacactatgaccaaggcaacttatagaaaaatgatttttcgggatcttaccgtttcagaggatgagtctatgagcatatgtgggaagcacaggagcactcaggcaggcttggtattggtacagtagctgagacacaatgaccaagaggtggaaatgaccaagaggtagaaagagctaagtaagaatggtgtgggtttttgaagacttaagcccacccctagtaacacacctccttcaaaagtccacacctcttaatccttcccaaacagttctactaactgggaaccaaactattgaaatatatgagggggggggagcattctcatacaaactgctataaagatgatgaacttaaaagttcttatatgatctacaaggatgaacaggcaccaatgagagggccttggattttaggacataaggggatggctggttacaccacacagatttagttggcaatagattaatttaggagtcagtggtctagactcccagagagtatgacatttttgtttctgtcctgaccttggttggcatttactgttaaagtcaggaaaaggtgactatatggggcatggttgtttgaggaaaacaagatgtgcctagacgtccagattggatggagagagaaggcctacattgttgtgtcagtgctctaccagccaagaaacagcctgcagccagtccataccggcatcattcctacatttgcacaagataggaaggagcttctatgtctaagtctgggtgagcaggtcccttagagccatagcagaggttcctgtgtctgtgattgtaccagactctcatgatctcttctgatctccatttaaagagaataccgtgtccaagatgggaaaatcttcatccctctgaacatcacagtccaaggtgatgtcatcgtttccatgtaccacttgcggtcaaccatcgggagccggctgcaggcgaaggtaagctttcaggaggacttggactgtgagctcacctgagtttgtaacaggagtattactgggtcttttctctgtatcactttgggcttgattgacaggtgagtttggagtgagaaagagcctgatggcttgttgatgtccatcttctttgtcactgtggaagggaatggagattgaggcaggttgtaacttatacatagtcccgggggggactctcttgcatcatgactttcagcaagccatgttcttgagaatatgagtctttttttttttcagtgctgtggttaggggaaccactataatatgagcactttcaactaagtatgagtatagttaagaattttttccccaagagatggttcagcaggtaaaagctcttgccacaaaccctcatgccctgagttcaatttccagaatgccttccccaaaggtgttgttactattagaattatcttattttgaaaatgtttccttcaccactaaaagagaccttgtacccatcaacagtcactaaccatctccactcccttcctcatctcctgactaccatgagtctttttcctgtttctatagacttgcttatatgcagacatatcatatagatggaatcatataatatgtggtctcctatggttggctttttttactcagtgtaatagattgggggtttatttatgttttagcaggtagccatattccattcctatatatagctaagcaacactaaactgaatgtatataccgcatttattaactctccatgcttagattatttctcctctttggctattgggaaagatgttgcaagcaattatatcttaatcaaatatttgctaagagcatatatcatatctattgtctaggtgttttggaccaacaaaaaagtaagattgtagccttagctttacagaactgaccctagaggggacaagtcaaacatatgaatatccactatgctgtatcagaggacagacaggactctgtcattgcaacagtgtttttagctagtggtcaccaagcagactatggaggtgggccttgaaggatgatgagtttgttgggctggagcaggagtctctgggaagaaagactacagaaaagcacaggacactgatgagtaaggaaatgtcttgctttcatggagagaagctagaaatgaacctgggaggccatttaatatttatataatatacaaagaatcagataaaggggtaatagaaggcacagacacaatattcgatgtagactcccgtttctcctactaatcctgcttcttgcacatatttttaggtgaccaacacacagatattccagctccagtttcattctgggtttataccactggacacgacagttttaaagttcaccaagtaagtgctgtgtgcacctgaggcctttaccagcatggcaggaaagctccaaaagtctgtaatagcatgctgttgtctccagagtcctgagctgcaggctattgactgtggctccatcacttagagaggctatgcaggtttgaagtctttccattgagtatggttgatctaaagaagagcaaatggattgagttaactagaaaggtctaacgttccatgttagggaacaaaggactatgaccttgatcctgtgtgtttgtggctagctatccccaacaggaatggtagagtttaatttctgggatggcataagcagtgactcctcacaagggctggctggctatagtaccaaaagaggttctggggaacccagctgcactgaatatggacctgctgatgctataacgtaatgtggctatagatctcagggtgtggctgaatctggggtggtggggatggttgctggagctaagaaacaggaaactatgaaggggttcagaggttcaggttcagaaggtggctttggacctgtttcactgttttgatgacccatttagccatgccagttaatactggccagacatatcaactctgcttctcacagcgcttctattaatatgttccatagtagtccaacaatgtgaagaagtgttattcttctgttttctctacatgagaaaactgaggcatagcaaagtagcacctagttagtacccgagtcaacctagaagtgagtttcaagcagaactcgacagcgtgagccgggtcctgtgttgagcatcctgctgactgcactgtttgtgctgctgtttttctttccattaggcctgagctggatgcatgtgatgtaccagaaaaatatcctcagctgttccaagtgacactggatatagaagtccagccccaagacaaagtgatcgacttaactccaccatgggaacactactgcacaaaagatgtgaaccccagcatcctcttctcctctcagcaggagcatcaggacactctggccttagggggtatggctcttggatggcttgagttttcagaatgaagcctccagttacacactgtgtggttttgtttcctgtgttcggttgaccttgggaccttttgtcttgcaggtcaggctccagccgatctcccaccagaccatcccaggaatcttgggcaaggaggcttctttgcctctctctgttggcaaggtatggcagcgccttgaccttaggatgattcgatgataaagtggttaagttgtctggtattattaaaactcttcttgaagcagtgtcaatggaaggttcctttctcccttatttcaaactcttcccttcatgtttttcaaattggcatcttgacgtctttccaggccacgagtgctcagactgaccagaaagccaatgtcggctatgtcctaccttcctcatttgcagtatttctaagccatatctttcaagactgatgaagtgtgatgcatgctaagatccctctttaggctggtgacaactcagaaaggcaaaacaaagcattgctgcctgtaagcagatattctaaagaccgagctgggcattgtctcaaggactgtagctccaagcatggtgaaggaagtcaccgtggcctgtatctctgctagttgctttagcaaccattagcccacacagggctctaccgctgtgctattttctcccacaactggaggcatttcccgattccttcttaacttagtgctttacattatgatcttgaggggacagccactggcaccctagttaatgtaccctggccacgattgctttgcagtctgtaggcgatagctatgaagtgtggtatagaatggaatattcaaactttataagagaaagggttggggattcagcctcagagatgtcctcagtaacattttcttgatccccctgatgtgtgtttgtaagacaacactcccagatgttttcaatgttaggttaaaaagtattcatatgattcctttggctccaaaggtttgtttacaaaatcttcttttgaaaaatggaacagactcggaagcccaggcagatatggcttgtagatagattgttggtctctttcttggtccttaccttgctcctttctcacagtaatggtttctaataagtcattacctatccctttccactgccgtgttaatatgtagacataatttctgtatgggcctggagagttggcttagtggtcaagagcatgtgatgctcttacagaggactgtctgtaacgccaattgcagggaatctaatgtccttttctggcctctagaggcaccaagcacacacacatggtgtccaggcatacccaatacaggcactcatgcaaacacataagacaaaatgtttttaaaaagaaagaatctctgtagataaacttagggttttgttgttgttgttgttttgttttgttttgtttttcttctgagacagggtttctctgtataaccctggctgtcttggaactcactttgtagaccaggctggcctcgaactcagaaatcctcctgcctctgactccgagtgctgggatttaatccaaatgtagtcacttatctgcctgtggtttttacatttttgcaaaggtatgtaaaatatattacttaatatctccagtagcctattttctctttctgcaacaatgtaaacataacaaaactcacctgacccagcagtcagtcatataatcgtttatttgcacattggtcttttttagatcagaaatcagagaagtcacgctgtgaggaggaccacgctgccctggtgaatcaggaaagtgagcagtcagatgatgagctactgactctctccagcccccatggcaatgcagagggtgataagcctcatggagccaagaagccaggcaaaaagcagcaggagccagctgcgcctcctcccccagaggaagtggacctcctgggcctggaagggtctgatgtgagcacgaacttctcttccttggcagctcctcccagcaattctgagttgctgagtgacctgtttgggggtgtaggtgccacaggtcctgctcaggcaggacaggctggggtagaagatgtgtttcatcctagtggacctgtgtctgcacagtccacaccgcgccgaaccgccacctccgcctctgcatcgccaaccctaagagtgggagaaggtaatctttctatttttctgctatctttgattttaggaataactttggggccaaacaagtaaaactcaaatgctttaataagctgaacttttctagtttttctagacagtttcttggaaaaacatacaacacatacaaacattatccattttggtagaaagatatggggttatatttaagatccatactctctcttatttactcttttgaatattttatacatgaatactatatttacatcatttcccccttgtctcctccctcctccaactccccccatgtccccctcactcagttctgaagttcataatctcttctttgtcattattgttacatctgtctcttctttgtcattattgttacatctgtctcttctttgtcattattgttacatctgtctcaagctcctgagtccctgtagtgttgctcatctgcatttagggctgactacttaggattgcataacctatctgggacttgtccacggaggaaaagtcagttactctgttgatccactgctcttcatctaggggtggggctttgggaactttgtctgtgttggcatgccccctggtgctgtcactgagcaggtcttgtttagccagttctatcactgagatgtcatgggtgcagctttcctgttacctccagaagtcactctcttgaagcaggcatcctgatcctctggcttaacttcttactcttcatttcctcttcttgggacttaagccttgagtcaactttagttacttctgtttgaagatggagatggatgagctattatttactacagcagctgatatttatgtggtacccaccacttgccagatatggaatacatgattaaatatgcatcgcttcttttaaaatccagtagacagatgctactgttatttccacttccgagttgaggaaatgaaagcgtagagtttaattagcagcatttgttcaaacagctgggcgtagatggggccagggtccaaacttgacatgtggactcagagctttcccccagacctcctgaaatactttctttgaattctagttttctagatataccctggctatacagtgaagtgtttgaatacaccaggatatacttgagaggctcagaccagcagcacgtctgtggaaagaagtgtggctggtctttgtagggcgtctgagccatatatacttagctaggttcacttgacacaccactacaaacgtgactcttctttttcctggccagccacagcattaacgcttgcaaggtgatctggctgggtaccagagattcactgcagcttctgaataaccagcacaaagcagctctgtgaccggcactgttaaccaagatgctgctgcattagaaatcgtaaagagatgaatctcaaccacctaggctgggaggatgctgtaggaaccttttcccatgctaatccttcaccttcgctggaggctcaggggctggtcttggcttttgaagttctgctggctgcctcttttgtgagaaggggaatcagaatcacagggtttgggctggtggtggctagatgtatacccgggagcctgcatcccacattgtggctctttcttctgtgctttgctttcttccatccagttctgattcatcaggatgagtaagaaggtctttcaggaaaacaaaatcccaagattgaagacagcacagtgttccatggctgaattttaagacaaaccatcctaaggatgtttgataatttaacttgccatgtcctatgctgcttggtgcattcatggcagagctagaaggcaccttcgacattagttaattctgtctgtgacatcatagatacgatgatgagcatccccagttgttagtggcagtcctagatgtatggctccagtgtcctgtccctccaaaaagaatcagaaaggatgccaagtctagaattaatgacctgcatttgaatcacacaggactaacacttaactagttggggagccttgttaagaacttaatttggccaggtgtggtagcacatgcctttaatcccagcaattgggaggcagaggcaggtggggttctgtgatttttcaggccagcctggtctatatagggagtcctaggccaggcagggttacgtagtgaggccctgtctcactaccaacacaacaacaaaaatcatcttaattttcttagttagggattatacttatgggcataatggtaaagactaactcttgagttttcatccatactatttgcacttcacttttggctattagggaatttcttaaacaaggtgctattaaaagtgctctagtaatctaagaagtctttagtgttttctccattgattagcttcaacctagaaacaagtgggtttaccagttgtcctcttacagctaccctgcaagccctagtgttctgtgttagagaggatgaggtcataaatggggtcaaggatgtgcatcctggactgcatggctggaaacagtataggtattgctactgcaactccgccaagtgttgggagagcattgtgcttgccactgacaccatagctgtaaacttgtgagccacatgcctcaacacgtcgtgacagtgggaagtgtctgttcgctggtttggctctcaggctctatttctagaatgggtcagccccactccaggatgcaagcagtcatcagcttggtacctacagatttggaagtgacatctcactttaggtagttcaaggagattttttttgttccttgctccacagtgagaaatcagggcagttgtctccatgcagcttggtgattggtgtcacacttcgtgactagggcctgtgggggttatctggagttttgagctggaaaatttgactatgagtctagcctaaagtatttcctggagttgaacaaaagataatttctgaacctcagtttctccaggaatgagtgaaggtaatggcacttccgtttgtcagggagaagttgaggaccacccaaggtcacctctataacacagtatagccccaagaagattcactattgctgacaaccagggattcccaccttcttagttcccttacttagttctctagctcagtggttctcaacttttctaatgctgcggccctttgatacagttcctcatgttgtggtgatcccaaccatacaattatttgcagtgttacttcataactataattttgctactggtatcaattataatgcaaacatatgtttttctggtggtcttaggtgactcctatgaaagggccccaaagaggccaggacccacaggttgaggactgctgctgtagctccaagaagctgagtcagaaacacttgtttcccatggactcaaaaaaggctgagagctcagctttactcactcctcaggttttactctgcctttagctttcaagtgaactgaaactcacttcatacaacatcaaagcaaagcctacttagtggggttgcctttttcttttgagatgggtcttacataactcaagctgagcttgaactcattgtgtagcccaagatgaccttaaacttccaatatctttccatttacacctcctaaattgtgtgattataggcatgtgccaccatgcctagttctatgtgatgctgggaatcaaacccaaggcttcgtgtctgataggcaaatactctaccaattgagctacatccctagtcccatgagggggttttctatcatttttctttatagtagtagtgtcctctgtctggtattttcccattaattccttttacatgagcactcattagtcactgaatccctgtagcctatacacagtttgcgtaactcatggattcatctgtgttgaccttgttttcttgggcactctgtgactacgatttactggttttatgttactaagattttcaaaagctggcttggagagatagctcattgagtaaaaaagcttgccatacaagtttcagaagctgagtctcaatccccagaacacacataaaagctggatatttaaggtgaatacctgtaatcccaggacttctccaaggagatgggaagtagaggaagatgagccaggagttccaggccagctagcctgatgtatgcagcagaaaaatgacaccgtctcaaacaaggcagaagatgagaacagatgtctgtgctctgtgttgtgatgtatacacacacacacacacacacacacacacacacactgtagtgacacatacactacacatacctacatacatatattacacacacactaacatacgctacatatacatacactacacacacactaacacactgtacacaccatacacacataatacacatacacacacaccatatacactaacacacatactgcacatacctataccacacgtatacattaacacactacacacactaatacacacactacacatatatatactacacacacatattaacacactacacacaccatacacacacatatcatacacactaatacacactacacatatatatactacacacacattaacataatacacacaccatacaaacacacaaataaacacacataatacatatacacagacaggatttataaaaagctaattggacactcatttagagttatagcttttctactaaataaatccagactctttcatctacagaggtggggtaattcctgttgtgtgggacccactgttagctccagagaacgttgtgaggctaggaagggctggggaagtcaggaggcaagtatcatcctcatatttctagtgtttgactaaataatggtggcagcttttcaatattataacaattaactgacaagataaagaaatgccatttccctttgttttctaggtgccacctttgacccttttggagcccctgctaagccaccaggtcaggatttgttgggctcctttctaaacacatccagtgcttctagcgacccctttctgcagcccacgagaagcccttcccctacagtgcatggtaagaaagtgttttctattctaatcggtggaatagtggagtggttgtccacaagacaacactgagtactttgtgtgtgtgtgtgtaagtgtgcgtgcgcttgtctattgtggtagttgctagccttgcatggctgcagagtagtcatgatgggttagtctgatttgaaatgtgttccacgtataaggcaaacaccagattccaaagtttcctgtgcaatgaaagaatgaaaggtatcttaatacttttataacagtcactcactagaataatacatgtattatctgctcaataaattaacatcgtatctgactgatttatgagtggcctgtgtagacctcgtttaccgcaccatcctcaggcctgggatcttatttccagttcccctccttcctatcttttattattcttttcagcaattcaggtttctcttgctctctttcttcattttgcatcctgatggatattagacttaacatcagaatgtaaagaaagccagagagcaaatgttaaaaaagctgtcgacttttggaactttttcttgagtgactgctgagctggagcagggcagagtagaaaggaaagaaccattgtcactaatagtggtgtaatggtgtgtgcttttaaatgcatgaaccgatgggaaggtacctggcactagagagatacaacagatgacaatgaagccttagaattctcgtcctggtgccttaggtcctttgtttgtgtggaatgtgggtgtttgcttgtgttgtgtgtggtatatgtacatgtgatgtttatgggtggtgtgtggtatgtatgtgatgtgtgcatgtgtgttgtgtgtaagtgggatgtgtgtggtttgtatgtgtggtgtgtgtatgtgggatgtgtatgtgtggtgtatatgtggtttgtgtgtgggggcgtatatgtggtgtgtatgtgtgtgttttcaatcctacttgtaatactgccttagtgactgaattctcctgaattttgtgggcaacttcctagggcaagattctctcctccagcagcacgtttcatttccgttctgcttggaactttgtgaggggtcagagtgtgctctcttgaagctctaatgggtttcttcttcttcttcttttaaagattaatttatttatttcatgtactcatgtatttcatgagtacactgtagctgtcttcagacacaccagagagggcatcagatcacattacagatggttgtgagccaccatgtggttgctggggattgaactcaggacctctggaagagcagtcagtgctcttaaccgctgagccatctctccaacccctctaacgggtttctttttgagtgaccgtagacacatatctgccaccagcatagtgggtgatgcatagtttttggctaattagtgttctgagtggctcatcactctcaatccatgctgcagtcaaggagaaaacagggccccagttctgagaggtttgtgccttggtgcccttgtctgtgccgagctaagccacgttgagcttaaggatatttccttcttttggcacggcccagaatcttaagtatataagtggggtacacaaagatgaatgagatagttcttccattcaagggactcagaatttaatgaagacaggcacccacacaactataattccaagtcagtggatacagaggtacataaagatgagccaaggaatgaacagcttctgccaagttcttgtgagcatgcacagatgagaacagcaaatatccctgttgcagagtggagtaaaagcccagcagcagaatggatccattagctacgtaaaagctgtgcagagccatgcaggctcgattgtcctgtgcaaactcagaagagcaggttctgagctgccttgttctcacccatcttctctccatttgcagcttctagtactcctgctgtgaacatccagcccgacattgctggaggttgggactggcacaccaaaccaggtaaaaaccagtgggttatttttgtatgcacgtgaccagtggtaaacgcatggtccttcagccaagatgaggtggatgcttggaatattgtagtacactgtgtagtttgatcattcccaaagatctgcagaccaatgtgcttagtgacatgaagtgtgtgtgtgtgtgtgtgtgtgtgtgtgtgtgtgtgtgtgtgtgtgtgtgctatttaactttccaagactcatctgctgtatatctaactcaacaatacaattagatgaatctgaactggctctaccactcagactctcctgtttttgtttttgttttttttttgttgttgttgtttgttttgtttttatgttgttgtttttggataagtctcagcttcagttttctcatctgagaaatggggggaacaatgtttatttatcctacacagcaaagtaagtgtaagtaaagcaatgtaaatggaccctccctcattgctcatgactaaagctccacgcccaccaatagttcccatggtttctttcccccagccccagataaccagctttcaatagaaaagtggataggtttcctactaagtagaatgtcatagcatttgtgtttttgtgagtgccttatgtcattttataaaatgtcccaaggtttatccatattgtagtccataggactatttcttccttttttaaggctaactcatatttcactgttcatataataccacatttttttttctttcctgtcgttttcagtggccaggtctaatgcggtgactatggtccttattttaatgactaccttggatgtatccccaggaatatgggtgctgaatcatggtcttttaaatctgtggcgatgttgcatactacttcccacagtaactgtgccctgctttgttcctatccaccgtggacaaggattctaattccttcccatttttacaaacacttctgattttttttttaacaaatgccaatcttgacatgtataaggtaatatctcattgtttacatgattggcatttcctttaataactagtgactgtggtgatttgaataagaatgtacatatacatgaatagttggtcccagttggtggaactgtttgagaaggggaaggtgtgtcactgagagtgggattgaagtttcaaaacccccaccccattcccagttggctttttatgcctcatgcttgtggataagatgtaagctctcaagtagtgctccagcactgtgcttgcctgctgccatgctccccgccatgatagtcaaggactctaattgtctggaactgtaagccccttaaacgctttcttctgtttgttgccttggtcatggtgcccattacagcaataaaaaagtaactaagagagtgatgttgagaatctttttatgtgttgtgatcatttgaaaattttcttagctgaaatatccttgcttatttttaaatcaagtcatttgtcaattcattattaagctttagttgcttttttattttttttatttttatttttttacatactgtggctcaaactctttatcagaataaaggttggcaaatactgtccccgattgtatatttgactgttttttttaaactctgttaactatgccttttgccatacagtttttttctcattcaatttgtccactttttgcttttattacctgtgactttgaattatattttaaaagaagttaatgggcaggatggttcaatggttaagaacattgtttgctcttgcggtggacccaagctagattcctggcacccacatagtggctctcaactctctgtaactctaattccagggcacctgatgccctcttctgatctctgtgggtattgtaaacacaaggtacacatacaaacatacaggcaaaaaacacccatgcacataaaataagtgattcatacaaaacattttaaagttaaaaatggtgtagttcaaagatgataagcaagacccctccagggggtggggggggcgttgagatacagcctgaatccagatctctgaagagagagagctggtacaggagaggtaaacacgggcaaaggcaggcatggaccacgaagatctcatgcctgacccgtgtgttgttcttacttcaggtcaccactctcctaaatcacagtaagagtatccagagacttttcacactctttcagactccatcctaatttgccttagaggcagccgagcgggttctctggaactcttgactttgagcatccaattcagggtccgaactcatcttcaatgatctctgttccttttcaggaggttttggaatggggagcaaatccgctgccaccagcccgacaggctcatcacatggcacccccacccatcagagcaagccccagactctggatcccttcgctgacctggggacactaggtatatatacacttatcaggtttagctgtgaataatacttgatgctaatgtcaaccatgtcagggacaaaggcacagctctacactgttcctatagcaatgtaagacttcccttaatcttttttgggaccttaggtaaaactggatccttgaactcaattcaaagcaaagtgagagtttaagcactagtgttaagaggaagagaggtactggggaagaaattaagacaggtttgagtgcataggtgtgggcttctcaaagtagagtctcgtgtgagtatcttagtattagccatagagactgttttgctttcttttcaggtaacatctcaaagagttgcttttttgcctccttttcagttaatgaggttctagagtggctccagaggtgccttggatgggattatagtgttataaaaaaataaaacaaaacaccaccaccacaacaacaacaacccaaaccaacccagagccactagagttacacaaggggttcagatcacacacttttactgtgaagtgggtttcaggtgagattcacagaaaagtgaaggcttaccattgggaagagagaaaggctttgcacaaatatttattacattagcattcttctttctcagccaagaataagccaaatataaaagcagtagatggaaataaatagattggagcagaggactgaagtgatggctcatcggttaagagcactgactgcttttccaaaggtcctgatttcagttcccagcaaccacatggtggctcacaaccatctataatggggtctgatgacctcttctggtatgtcttaagacgggggcagtgtactcacatacataaaataaataaataaatcttaaaaaaaatgggagcagaagtgagcgaaatagaaatggacaaataatacaaaaaacagaacagtgaagagatgagttataaataaaatgggcaaatccttcaccaactaaagaagagaagatgcacattaataaaattaaaggggggaaggagaaattacaacaggtatctgtgaaattcataaaatcacaagagcatgctttaaaattttacattcctctaaattgggaaacctaaaagaaacaattgcatttccagatgatttgacctaatgaagttaaataaagatggaaaacaattcaagcagttctgtaacaagcaaggaaattaagcagtgatctgaaaaaacaaaacaaaacaaaactctaaaactgaaaatcaccaggcccagatatattcatagacgattggttataccagggcattacaaaattatagtaccaaccctgctcaaagtattccgtaaaattaaaagaaaggtatagccagttttatcctgatgtttaaaccagataaagactccacaacaaaatttctctgatagagttacacaaaaactcccagtaaaatacttggaaactgagctcacgtaataatgaccactcaccacgaccaatttagcttagcttccttccagaaaataaggatggttcaacgtatgtaaatcaacaaaggtcatacatcatagaaacggactcagggcagaactcttgacaaaaagcaaacattggtcaacaatagcctttgaaaagctcagaatggagggaacatatcttaatatagtaaaagcagtgtgtggtcaacctatagccagtgctaaatgaagcaaaactcaaagcatttctcctaagatcaaaaataagacgaagatgtccgctttctccactcttatttaatgtagtgctggaagtcttagccagagcgataggacaggagacttgattaaaatggatgtaaatagagaggaagaagccaaaaagcacctttatgcgttggtccatggttctacacacgagagaccagaaggaccccaccagaagactgtagaagctgataaacgctttcagcaaaatagtaggataaaaaaaacccaacataacataaaaagccagtatccatcctgaatactaatgtttgtgctaagaaagggaacaaattctcatagaagcctccaaagcaacaacagaatatcccaaaacctttggaataaactagccaagggaatgaaagatctccataatggaagccttaaaatatttatgagagaagcagaggaagacattaaggaaggaaagctcccccgaccacgcccatggaccgcaagaattaacgtggtaaaaatggtcaccctatgaacaagcaatctacagatttcatgcaaccccaatcaaaattcgctgccagcactgaagggatggcttagtagttaagaccactgattgctcttccagaggacccaggttcaattcccagcacccacataaccactcacacttgtctctaactccagttccagggatcagacaccctcacacagacaaaaaaacaaaaaacaaaaaacaaaaaaaacaataaattacttctgagttcgaggccagcctgttctacaaagtgagttccaggacatccagggctatacagaggaaccctgtcttgaaaaagcccaaaaaaaaaatgtatgtatatatatatacatatatatacatacacacacacaccacacacacacacacacacatattccaatgccactctttacagaaacagaaaaagacccttaaaatccatatggaggcacaaaagaacacagagagccaatgcaatcctgggcaaaattaatattgctggaggtatcaccatacctgatttcaggttatactgcagagccatagtaatggaaatagtgtatagtgttgacacaaagccagactgttgttagtgaacggaaacacccgaatgtaatctatagagctagagctagagctatgtgcttggattttttgtttgtatgttggtttgacaaagatgccaaaaacatacattgtagaaaagcagattaagcaaatggtactaagaaaactggatatctacctgaactaaaaggaaaacaaatccctatatttcacttcccataaaaaccaactccaagtggatcaaagaccttcataaaagtcctgaaactctgaaaccattagaggaaaaagtagagaaaaggtctcctctgcacaatgtctacataggtaaggactttcgtgagaggagtgcagttgcttagggaatattgcccaacattaacaaatggaaccttatgaaattaaaaatcttctgtatagcaaagggaaagttaattaaaagaagataccgcctacagaataggagaaaattctttgctgctttacttcagagtatcaatatctagaatatacaatgaactaaaaaatactaaacaaaaataaaaattaaactcaaattgggtggtggtgacacatgcctttaatcccagcaattgggaggaagagacagtcagatctcctaattcaagaccagcctggtctaaagagtgagttccaggacagccagggctacatagagaaaccttgtttcaaaaatcaatcaatcaatcatctcagtaaatgacttgataaaatgaacagttttcaaaagataaagtaaaaatacccccaaaatgatatggaacacattcaacctcaataggcatcaaaagaattaaaaattgcacacattccatcttaccctagtcagaatgaatgccattaagaaaacaaaaacaaatgctagtgctgatacggacaaaagggaatccttatgcattgctggtgggaagataagctagtcagtgttgactttttttaagccgtttctacaaaaaaacctaaccaaccaaccaaaaaagtgtatcttccatatcagcttacctctctatattaataatgtgacattatactgcaaggatctctctctctttctctctctctctctttccctccttccctctccccctccctccttccctccttttcttcctccttccatccctccccctctcccttcttcctcttttttctttatcatccatctatctatctacccatttgtccatccatccatccatccttccatccatccatctgtcagtccatctgtctgtctttatccgtttattttctgtttatctatctgtcatttatgtcacttatctcaggatagacagactgccttctttttggttcagttgattatcaaccacttctgacattatttattctgctgttcttccagtcattggtctgttttatgaattctcctttgccttttatgtctgttttactcaagtctatcaagggaaagaaagaggcatcctttctgtacccgtatcctaaccatagaagccaccctggtcagctctcctatcctgggccctggcttatgtgatttcagattgaaggtggacagtgggatagtcaggcatttcccaagcttcttatactccaggtctaggtgtcttctttttgtaaggtgtctgtagtcatttttatggggaataaaatttagaagccaagatctgtatactaagtatgattattggagtgttatttctctcccttctaggagacatagtgtgtgtgtgtgtgtgtgtctgcaggcatgcatgtgagtgtgtgtctgtgtgtattggtgtgtgtctatgcatgcatgtgagtatgtgtgtgtgtaccgttaatctgactcccagtttctttcttgccttctactccacatgtgaatcttacatttcctcacattgcagttatagtcagacagcatcaatagtttcagagtagctaaacctgtatcaccacaaacaaggaacctgaacgtgcagtttggaaatgcagtaattctcacagcctccttctcagaacctggcttcttacacttctctactttttaaggtatacagcttagaaattttaagtgatttttcccactaaggccacgggacaaacagattcatcagtggcagattattataagccaaaatttccactcattagacaatacaggagtaactcagaaaaaaacaatagacagaggcctccagttcaacatcaacgctcgactactccctggataatcagaagttaactggcctagaggtggctttggtgggggtggagctttgtgagttccaggcaatctcttatgcttcccttgaggagggccttgaaggtgtattttgtcaaatgacagcggtaggcagcacatgttggtgttgcctctatttccaagcactctcaggtcaggaggatcaccagtgtgaggccagcttggcatacatagggaattttagaccatatgggttgcatagtaagaccttgcctcaaaaactggggttggtgatggaaaatgacaggggcagcgataggcttgagtgccaacctgaccaaatactcattgaggtttttgttgttgttgttgttgtgtgtgtgtgtggttttttttttaagatttatttataagtacactgtagctgttttcagacaccccagaagagggcatcagatctcattatagatagttgtgagccaccatgtgattgctgggatttgaactcaggaccttcggaagagcagtgagtgctcttaactgctgaacaatctctctagcccctgatcattgagtctttacaatgtgtcaaacatgtggttaatgttgttttgtggtgtgtagtgtacctgcgtttgtttaattcaggggctgtgaaacacttcctgcaatggttatgtgtttatactatacttactctgataaagacatagttattttgtagataagaacattgaagctcacagaaatttaaaaaaatcatttatcttaagaaaagcaagatgctttgtttgtgtagaatccaagtgcccaacctggcacatggcaggcatttcagcacctgcgggagaatggcttgggacccatgcctaggagagcaaatggtgcatgagagatagcactaaactcaaacaggttgattccagatgctataatacagcatccatgtgtgaaagggaagagggctctcagggtctaaatgaaaagacatagctatagaagaaagccataggaaggggtgacttttagaagcagctcagaactttggctgcagaggtgcagagataagatgctcgtggtcagggcatctctgttaaccaactgtgtgatcacaatattctcgtgaccctttgcattgaattgacctagtgatactatttacttacacgtaacacactgtgaagatctataggtgttagttgtttcatcatcgtcatcatcatcatcattattttggctctttgaagggtctttggagatcaccgtgtttcagcttctcaatttgcctccccaatactatccctcctgcaattcaatgcggcagtgtaaaactgaaacgtatttgtgaaatttagaaacagctataatgctcttgggtcctaaccaggctttttcttatagcaaatgataattaatcctaatagttgacatttaagtagaatcttaatgaggtcacttgttttatcccaatacttaccacttggtagttttgactctagtaaagaaattaaacttgcttaggagggagcagtctggtcagggtatcacagtatggtcttttggcttagactaaaaaatctagattcaagtattttgccataggctggctgtgtgatatagggagaaaaaaaaacccactaaagtactctgaattgctcttggttcattgaagaaaaaagtagggcaagggcactacctgggctgactgaggacatgacaggcagatatgcctgtgatttctctatctgttaggaaagttaactctgttaccacccaaagcagtttccactaaaatcatcacaagcaatgccttgtgacccaagtttgaagccactctcaatagccttactgcctctctcccttctcctttataggtagctcttcatttgccagcaaacctaccaccccaactggattgggtggaggatttccacctctcagctcaccacagaaagcatccccccagccaatgggtggagggtggcagcagccagccggctacaactggcagcagacacagtctaagccacagtccagtatgcctcactcctcccctcagaaccgacccaattacaacgtgagcttctcggctatgcctgcagggcagagcgaacgtggaaaaggatctactaacttgggtaaggatgatgacatgagactggtacagggtgacctgcctgtattgtcgtactgctggggatgttatgtctgaaagacgccattatagagtttaagggacatcaggcaatccataccccaagtactgtttgctttaactactgagctgtctctccagccctgctagattagattcttggcatgaaggtaaaaataatatgtgctaaaattgaactcgtcagatagtgtcagatacacttggcctttcagttggcttgatgattctctttgaggaacatggacaaaggggattctcctgcacagtggttaccatggattgagcacttacaacatgcaggcatagtgtagacatgttcatgtattattttatagcatcttcaaaaccaaagctctattatagatgaataatctgtgaggtagatctaaaaagtaatctctcaggtttttgagacttgtgacagagcctggatgtgaattccagtcatttggcaccagaacatctggctttcagtgtcaccccagctgagcatgatatcagtgtttgttcacagccctgctgtgacagaaatgcatgtgctggagatgtgtgacgtcatgtttattcttcagttctctggggcactcattggacaattctgttgagccatgtggcgtcccattcattattgttttgagaagatagtgggtgaatgtctcctgggagcacttaattttggtgtgcacatatgtgatctggcttcttaagaagagagacggcaaaccattcccaaccaggaaaaaaacaaaacaaaacaaaaaaacaccttgggttgattactgcgaactgtgtgggctgctgtggttttgttctgttttattttcaaatgaacactgagataaccaatcatgcttttagctcattcacgtgacaacacggtactgttaacatcaccctcattctctggatgaagaagcagaggtacagatgcctgcaacatccctgtgatcatagctggattttagacacacagagtttgtttccaggatctacctcttcaaaaagatacagagagatttagtctgaagccagacttacagggagagggcactaggatccaccgaacccatcaactgggtatagacaggagagtgataccaaggaggttgtcaaggattcaagtcttggctcttgtctaattgctgatgctagttagttgtaatcattgtagaaccttgagtaccttcatccacaaagttacactggtgatgaaatgggctttaatgatctagactccagtcctggccttgccataaacacactgtatgcttctggacagacctcttaggttatctattcttccactttcctcatctgttacacagagcctttaatgttcctcacaaggcaactatgaagggaacaaatgtatggaaaatctatactcctgtactcctgtgaagtggcagtttgacattttgtttaagaataaaagttgtgatggtttccaaatattatgttgcagaagggaaacaaaaggctgctgactttgaagatctgctttctagtcaaggcttcaatgcacacaaagacaaaaaggggcctcgaacaatagctgagatgagaaaggaggagatggctaaggaaatggatcctgaaaaactaaaggtgagtgaccatcctataggacaaagccatgtgacaagtcattgtgcccaaccacctctctattcattacctttgtgttggtcattagggactgaatacttgatagatacaacttgaggaaagaaagatttattctgacccatggtctcagaagatttcagttttggtgggataggaaagacatggccatgcacgcatgctgcatggctgttcacttggaaacagacaggaagcacagagaggggcactgtagcaaatggtgggcaggtggaaccttcaaagctccattcctagggaactacttacttctactagctaagccccatatgggtttcacaatctccccaaacaccatccactggtgaacaggggctcaaaacatgatctggtggaaaagaatttaaatcataacaccttctaagggtccttacctcctataatgtcattcaccaccataagggtaaaaagtcaacactgattctagggtaggacacagatcttatcaactatggaaggcacttcatactggcaatcactgggttacagtgggtctctgaagctgtggtttgaagatggctatgcttttcagtagcaaagtagctttgggaaggctggtgcatgatgctgagtttgcccaccagatgaacaatggtatttgactctgtagtttggaagaagcctttagattataagtatcagtcattagagtttagtgagaacaattcaccctttgtattttctgtccaccttgagaactttctgttcttggttgactgaaacccagtttcagttctctgtggatcaagagagaactatttctgcacccagggtttaccattctgaagacattaggcatgaggtccacataggttgaggacaggaaagctaatgacggtgaagcccctggcctctatcacagactccttccacttttaagtaaagaagttctattttttttcttaaaacaaaaaacaaaacgaaacaataaaaacatctatttttgattctaaagtctatgtgagaatcagttttggaaagggagaatgaggttgtttgtttgtttggtactttaaagaaaaaagagggtctggagagatgattcagtgcttaagaatgctcttaacctgagttcctgaggtcctgagttcaattcccagcaaccacatggtggttcacaaccacctataatgtaatgtgatgctctcttctggtatgcagatgtacatgaagataggacactcatatacataaaacaaacaaataaatcttgaaataaaagaagaaaagggaaagaaaagaaaaagaaacttgtcagtcagtgaatccaagttcgttaactggtagaggggataagctcttcacagggaaggcccagagtggacagctggatgcagattagcctgaaggcagagggtggctctgaaggtgaatggcatgaggacacagatgaggtacataaagatcaaactggcatatgacttatggcatgacatacagctctggagcagtagctgagagcttagatctgatccacaagcatgaggtagcgaaggaatgatataggttaaaagaccttaaaactcaccccaccttctctaacaaagccacaattcctaacccttcccaaccatttccaccaactggagaccaagaactcaaatatacgagactatgggagccagtctcactccaaccactacagcttccatttaatcacatattttctttataagatggaggttgttagtttgaatcaatgatataagggatcaatttatttaataaacctttcgagctctactcggtgccaggtctgtttggctactaagataaagtgataagaagcagtccaagaaactcttctttcccatcaatagctccaagtattgacgggaaaaggtgaacacacatactcaataatgagtgacatatatggcacgtttatagtagggtaggccctattttttcccctttgtggtaggagtcaaacctagggcaggtaagtataccactgagctatatcctagcacaactttggcctacatgaaaggaatatttagtggctggagcaaagtagatccaggtgtgacctcatgaagctcgtgctaggagtgtataattagctgtatgaaggcagggagaaatgagctcaaaccacagaggtgaactctgaagttcatgatcagtttttgaacagtgatgcagactagaaggacgagggggaaggtgggcttgtgttccagctagaggggcctgcttgcgcagtttcctagcaacagtagcggtaaacagtatagatcttcagagtcctggtaggcagaaagcatttgagggtcttaacctttttggtttttcctgtttgcagatcctggagtggatagagggcaaagagagaaacatcagagctctgctttccacaatgcacaccgtgctgtgggctggggagaccaaatggaaacccgtgggcatggcggatctggtgacgccggagcaagtgaagaaggtgtacaggagggctgtgctagtggtgcaccctgacaaggtgggtagcacctgccctgtcgtagacttgcccggtccctgtttcagtgttcacaagtataggataaaaaggcatgctttcaatttgctgattgactaagaaatttatttgacaaaacttactctgtgggttacttaaatcaagtatttaaacaaatagtcacaaggcatgaggttgtcaggaagcagtcaaagcatccttcacaaacaataggacaaacattttattcactatggaggctgagcacttcaaaggaaaaggctattgtcccagtggagggcggaattgtgtctacccaagagacaccttagggtatgtttggaaaaaagatattggtgaggagcaataagatgtttaaaatgtcagtgtgtgttgccatcactgctcatggtttgagtaaattacaagagctcagaagagctccacagatcagaacttgagctcccacctggccaagttcattgcagtttgcagccgcacgtcagactgaagtacaccactctgctctcattgagccgtagcagatatgagacatgaagtcatgattgcagtgcctttggggaacgcgtgtctgaaatccatgtttgatgtccatccctccacgctccttatgactaaataggataattaatgggaaatgttaattcatgaactttaatcagtcataagagaagtaagagcccacagaaactggcaaactgccctactagaaggagtctcaaagacctacactttatagggattggaaagggggagttttgaaacacagtcaaacaaagacatccctatcattaaccatgagatgtgtcttctactgcctaacaagctcccacttttcttcttattgatgggtttctgttatcctctgtgagctttctgtagtgcgcagtaattaatctcatgtagatagactgtaaaaagagatgtcttaatgaaagaacattttaattgccattcacaaactcagtgaatttaatattagtttaattttggtctgtggtatctaattgtgttttgtgttttctttaggcaactgggcaaccctatgaacaatacgcaaagatgattttcatggagctaaatgatgcctggtctgaatttgaaaaccaaggccaaaagcccttgtattaatttgtgagcttttctatgctggctgcagtcctgtgataatgcttagtgtgtaccacagttctgagattttcacagatgaaccaaaaattctagtaatgtatttccaatactaaactgttaatttcctcgtgaattcacttctcatgataaggaatgtgaacgtttggtttcttgaagtccatagcaccaagaggaactctagtgagctgaccttgcagagtcttgacattccagcctgtcctttgggaagccgactcagcattttgcctggggaaataggacctcggccacccaaggtgaaggcatgacatccatctcactgtctgagattaagatttatgagtggacattatgataatgggattgcgtaatggttttaaggaattgatttagggattgtgtatgtgtgggttttttgttttgttttgtttttaaagatgtaatttgaggaatggctttacacaaactccaagaatatcaccaaccaagtattttttaatggaaacttactgaagcctttagcttcttcagtgtgtgtcctttggtcaagagcattaacaattattgaagtgacttaacggtggaaaggggttatgtagaaattgaggaattacccctttcttttcctggatgagctataacccaagcacatgataaagaaatcaggagccctaagatgccaaatcttgactccaggtcaggacattggggtaccagctcctttttcctttaagtttgctgttgattgaagaaaaactcttgaacgataccaccaccataattccaaacctatttgaaatccccttctaattgttgccatgaggctcagtgctctttcttttgcttagccaagaaaacattcttcatgggtgacagtttgcaaagcagcttggcccattcacactttgtatagacctggcattctggtgactgcaagccaggggaaaaacagagaagataacactgagtgctatttagaagggtttggttggggatagagctgtggtgtgccttcagatccaattggatagcttgccagttgaggagtcagagtcccacccacccagtggatctggcccctcccaccccgggattatctccgctgggtttgctgttggatgcatgtgaaaactatgcaagaatgaaactttcccagactgacatcagctggtggcagttcactccagtgctcagagcttcccactttgcaggggaagcagctcctactgctgggacttcgctaggtctctgggtgagcacatgtgcggcatctatttatctatccatacctgcatatgaatatgtctaacgtgcacacacacattcacaaagcaggtggtcaaaaagattatcatgctgatcttaaaaggttcacattcaatattgtgaaaagctttcagaagttgtgtttccaagacaatcattttgtttgtttgtttctgttttaatattcttgtgacaactaagttgaaaaagcagcatgtcagaaataattttgattctatatagacctcttctctttttttaaattataaaagtttattatttattttacctttaactgataatgtgaaattctcaaaaatatgttctctttaaaatatacagttgtaaactcttcaaagtaaacataacaatctaggtgttatttattaacgtattatacaatgatgtctgacccagtatgtgcttgtcctatttaagattggaatgtgagacatgttgctgtgacctgttttgttttgtttttttgtttgttttgtttttgcctcattccatatttgtagatattgtgtgaactacagtatataatgacaataattaagaggatattatgtggctgtcacatacattttgagatgatagaactatattagctttgtgtcatgtttgcataggtcattaacgttcacggtttaaataccattaaatgttatgcgattagcaatgaggaagaacccttccttaaatctgggagtttcccaccgctctttccctgatgcattatgatcctggacgcctgtctatctcaaaactcttaacacgtgcagaccaataggttctgtgttccttttaaataccaggttgtgacagtttgttgttggccagatccaccatctcattcatatttattgtaatatatttttgttttgtaaatacatgaaacaaaacaaaatgtcattgttctaaaatatttgtaatgtatattaaaaaggatacaaaatacttttagaaatatacattatttttgtacctgcgggagtacgaggggccagagagatgacgcagtggttagacgtgcacactactcttgcagaggacctcagtacccacactgcctgtgtcttcagctgcagagggctctgatgccctcttttggtttccacaggcacttgcattgacgtgcacacacccctcctctatacacatgattaaaataaaatagatcttaaacaagcaaagaagcatcccaaaccaaacaaatgagaaatggagtacaatggcaaacttgacagacaccctctaacccgacttgcttttaaagatcggtaagggggaagaatctgaaaagtgtggagtacatttgcaccaaaaggtaacctgacaagattctatgtttatactttcatctcccagtatcactcatgtcttgaggcagacagacagacagacagacagaccccactggtcatgtctgatgaaaactgtgttgcaaaaggactcagcataggaatcctgttcttactagaatatgaatgtgtttccaaccacatgtttgtgtgctgagtcagagagactgatttaccatcgaacagaaatgctggatatttttaagcctgaggacagagagaacatatgcacatttgtagacacactgttccagagcatttgagccacggctttgctgatgtgtccagaccagtggttttcaagcttcctaactctgtgaccctttaatgcatttcctcgtgttgtattgattcctctaaccataaaattatttcattgctactgtgtagccgtaattttgctacttttatgagctgtgatataaatatctgatatgaaatatctgtgggagccacaacccacaggttgagaacctctggtctggcagctcaggtcagtactagtgctactggtgagaccacattgggtaagaagtcagcacaaaagttgaatttcagaggatgttatcctagttcaagacattttccatgatgaaaacaccagcttataaaatgcaggtcaaatcaagagttttttttttttttttaactattctaaaaataagccataaagtttgtggaatggtgatatatgttggtttgaaactaaaagagtagctatgaatactgatttttttcctacttaatatctgttatattgacaaatactttaaactctgagtcgtgattttatcatttgtaaaatagattccttacaggtcttatgaggcaccatgtgtgtaaagtattacctcacagatactagccaataactatcagtactgctaatgataaataagactaggtgccacactgatggtttttgagctggaaatacatggagccctcaggttcagaaacggctccaggaataggaaagtctgctgggaacaccttattccttgacacttctaccagtctccttgggacggggtgagatctgggtgtagaaaatgacagatgcttgtttctgttagtgtcatagcacaattctgtttaggatgcactgtgaccttagagcctcctctggggcagatgtgtgaccttgttgtgcccttacatgtgtggcgctgtaagatctggagtttgagaagggtattttctgtggactagggggaggtgatactatttattataaacttactaatatttgctatatcagggctcagaaaatgactacaaactacagattccagaacccaaatttctcctatctcccttcttcttttcttgtatctctcattcttttctaggcagatcatagagactagaattcatctttgccaaggcaggtcattgaaaccacaccttttccccaaagccagatgtaaaaacgaaaatcactcccaatctcctcccttttgccataagagttggccacctgaagtcctctctcattctctgtagatcacaaggtctcttttccagggaagggtcttgtgccatatctggagggagcgctgcacagagcaaccaagaagaatgaatagacagaccctttggattcctctcttagtccattactgttcggccagtctctttctggcccataatctttctgtgtggctgccaatgcttcatcaaacctaaacataagattgcacagtacacacagacttcttgagtcttcttcagcctgcaggcttctgtgtcatttcaaactatgatcaaataaatttgctatgatttttttatgttgtaacctgccttttgctatagttgtattggccatgaaactttatgaatggtaaagggatcaccccttttttgttcccagagttaatataatcaacccttggtatatgctatagatgagacactagtaaatatgtatattaatatgaaatcaatgaattgctttgaactctcttaagataaggttttactgttgtttctcctcactgtcaacccctgcctcctctgggcataagatctactatgagaagaaagcaactgattaattgcattagtgtttcaagacttggtctcagctttcctgttccgtgtcactatttgagcttgagttttaccaactgtcttagttagggttttactgctgtgaacagtcaccgtgaccaaggcaagtcttatatagacaacatttaattggggctggcttacaggttcagaggttcagtccgttatcatcaaggcagcaacatgggagcatccaggcaggcgtggtgcaggcagagctgagggttcaactccttcatctgaaggcagctagtggaagactgacttccaagcagctagggtgagggtcttaagcccccatggtgacacaactactccaacaaggccacacctcgtaatagggtcactcactgggccaagcatatacaaaccttgcaccgactgtaaagtggtgataataaaatctatttcctagcctttgatacttgaactcaaggaggaaaccctaagattcatcttaaggactctactctagtcacaggcagtcagacagtggcccaggttaaatagctgagtaacataggagggggctggtcggagggagatgcaggttccagtggcttttcttcttgtggaaatgtggaattggtgagtaggatggtttttggtgcaacatctggcacaggaaaagtccactttctcaggtaaagtactcagtccagttgttgttggcagaaagcagtcggagagaaacaaacagtgtggttgagggtggaaggagagtgggacggtttacatcacataatctctttatttaaggtgggaaaaacctacctcctcactaacagatctcagtgcttataaaggagaagttaaaaacacaggtctggcagagcaattttctgagtgcttttataggcaccataatcccccattttcaccaggtacgttgtccatgatgctggcacatgcctgacactgcagaccctgtgtacaagcttcatcctgtacacactctcaatggtacaatggcttaacttgttgtaatggttacaatagtattaacagtctaaaggagaacaattgctctattgtggtaagttatgcaaatgtgcctctcagaatcactgattgtatactaggttcttagcagattaagcatatatatatgtatatacatatatatgtgtatatacatattttccttttaagtttagaacttcgtgggttttgactttctaaccttgtctaaagagctgtttggttcagttcctattctttctgaactgctttctgtagaggacttggactactggatggtttctaagatgaaggaagattccactgaagaaggtaagaataagatggatctggaggagtgaaaattggccttagttacttgcaggcctgcgtttatttaaggacctaaagaaatccggacccacagagtttgtaatgaatgagggggatagacggacgcggtagtttacacaaaatgttaatgtagtttgctacaaagcaagcaaatctatacaaaagtcaaagatcttacatagggatatctctaatcctgatttctggtgctgtcactcactcccgatctctactatatcagccacacactctcaaaacaaaccacacaggcacacaggaagagtcgtcctggaaggtaacctctccccatccttatcccgtgccccactttttccaccagtcctttcaggcaagtttcctaacagccagccagggtgatggtgagcatctagaatctcctgaggcagagcctgggccccaagtcacgacagtgaggaagggatggaccccagattgagaaacagggctgagatgtctcagaatccaggatcccccgaagagttaaaataaaggagttattctgaagtaatcaaagtgggagggggctgagactaggagcggagttcccggccagcggggcggtgctgaacaaactgggagactactggaatgaagttctgagtggcaggaagtaggaccagtagagtccgagctatgagtggcggaggcgggatcagtccaatggggtggagttctgcatggcggattgggatccgtgctggcagggactgagctcagccaactgggggcggagtccgcgaagtggaggaaggcgttgggggagggtctccatgagctggaggcaggattatgtgccagagtggcggaactgtgggccgagcggaaccgggcccggcagaggaggagctcagagtggcagggatcagaaccagtataggaaatactgagtgcctgtagggcagaatctggcataattgggtgtgaggttgtaattggcagaattctaaaccagtaggaatcaggttctgcatggatggtgggattgggcttctgggggcgggaagccacgggatggggcggagtctaaaatcaggggcggggcctaatgaaggggcggggctccgttggttgggtaggaagtcaataccgtcagggggcgggccgggctttggattcgcgcgccggccctggctagtctgggtgtgggcggcttttggagaaagccggaagcagcgacagccccagctccagagacatggcgggcgttaaaggtacactgcgaccctcgcccgcggctagtgggtggggtcgctcctggctccaggctgcatggcgagcagcctgtgtgcgggtgtgcgagttcctgcagaccgcggcctcccgaatgcgcggcagaggtgttttgcggagcctataaacgctcgcgcccacgcccacgcccgtcagttcccaggcgggggcttctcccgtgggctgtacgttccacagtggtcccctgggcttttcagttctccgtaggtcacatcagggtcccacatcctcaccttcctgccccgccgcagtttcctgtggcttacagaggagcctttgtgtccaggatgtgtgttggaaacttggtcctgttgttcccttacggtttttctcgctgggcagaataatttcgggcgtgtggcactttggaaagtaaccagaaataccctattcgacgcaaccttggggctgcaattagatgggattttaacaagacttttcttgagtgtttactggtctgtgaacagagcagtatgtgctgtttgtgttcttgaatggtgatgaaaggagggtaccgaaagattatcaccctgatctgtgtgaatgcagagctttgggcgttgggtggggacaaagttactggaaggcttcctggtatttggatttctggtcatccgcacagagaagacttaatttatctctgtgttggacttcctttctttgaaaactatccacaaagaccttcccactcaccaacatctgtaagatggatacagtgtatactcatgtggatgcactgtacattatctgtgcacaactagtaacagacatagctaaccattttggggggacttttgtatttcaaatcaaagtaaacatggtttacttgggcaatgtccactgtatgacgtatccatttgaagacagtgtagaaagcatgtaaaattgtgtctcactactacagagtgttcagtcctggacagaaagtacaaagtagcaacagtaatttatgggcctatgtagtgaaaaggaacaaaggctatgaagtagacaagagcacaaggaagtaaaactttgcccataattcaactgttattgagaaactatgctggagacttgggataaaagataagtgagaagtttggactgagttgattgccgaaaataattatattgctgtgtaagaaaatgatgtgtgctctgacagttgagaacatagagataatatagtggagggaatcatgttgctccaaaagatatgttttaagttgtaactccctgctgccaaatgagggtgtggccttgtttgcaactagcagatgttatcaatctaaggttgccttgtgtgatgtccttcagataaggggggggggggaagcacaaagtaaggattgaagcagagggccccaagatggcttggtaggaaaggcacttgctgtcgagccttaagacctgcgtttgatccctgggacctacctggttgaaggagagaaccaactcgaacaggttatcctctgacctccacacttgcacacgcagtatggtgcatggctacaagtagatagataaacgtaaataagtaattttttaaaaagtaagagaaactggagtgccgtagctgcaagccaagcagtagtatagacatagcagcactgggcaaggaagtttgttctcttcagagacgccttaattttagaagcctaacttcagaaccgagagaattcattccctttgttcagagccacccagattgtagtagttcgatgtgaagctaatatgaatgaccactctatggggggaatagaagaggcgatagttatgctgaatttacaggactctgtaaggcttgggttaagaccaggatatattcatgactggggcagaggccatgacagaacacatcttattcttctcattttcccaggctcttggaggcagagtagggaggattgaagctggagaaggtaggggtcagatggtagtgagcctctagtgacaacatgcaggctgtgaacacatttgcaatgggtaacacacacaagtacctactgatgtaggtggaggaaggactggaagaggctcagtttggcagcagacagcgagcatacatccaggctaccctgcgcagagttcaagagaagacgggagttttgaatgaagtctcggtaaaatgagttattttgatttgctgtagagcacagctctggtttcagccctctaagattggtcttcaagagaagatgaagcgtgtgttgggagggtgggggtgggggtaccttctggtcccatcgtcacaccagccctggcctggatgctgactccttggaccgcaagcctcaagggagagtgctctggacactcattagcgagcagcatcaatgcttaaacaccgctgatggcatcctgactgggtgcttgtagttctcacttccttctcccagtaggctccagataaaaaagatgagctagaaaaactgtttataagaaccaaaatgatgtggatccctgnnnnnnnnnnnnnnnnnnnntggggtgggggtgggggtggggtgggaagaaggaaagttattttgcatgttggatttgagctccttcttggctttggctctgtggcacagtagtccagattagaagtggagttcttaggatctcttgtgggccggagccttgcatttgggttgaactcagcttttcagcagtcatgtgtgaagcgaaaagagatggacttgaattgttggttaactcctactgtaattaagaaatggcagtgtgctggcaagatggcttagcaggtaaaggcttgcacacaagcccagtgatctcaatgcaatcccgggatcctatgggaaggtggaaggagagtactgatttcataagattgtcctgtttacatgtgatatagcaatatacacccccattgatcatatactcagtttgagaagagagggggtaggcaggaatacaatttctaaacacacacacacacacatgcacatggcttgaaggcaaccagcagaaataaagttgtgaaatttgagagatggtttgggaacagaaagaagaagtaggtgtgtggttcgcatgctgtaggttcccagctgaaagagcgaatgttgtaggtagtctgatacagagaagggtcagggctacaagggaaagcccaggcaacttctgaactgtaagtatttgtccattaaaaataccatattaagaggaaaagatacaaactactatagaaattccttcgtcatctcctgacatctgtattcaccaggtttcttggaagggatattagtatctttctattagacagcttccctaaatatcttaagtaaaagaaagcaacaacaacaacaacaaaatcttaataagtcagtgactaattatattagggattttcagaagacaattgaaatgacccaatgtcttgtgctttgagatatcattttatcaaataatatagctaggtgagtggagacctcccatagccagcattggttgagcctcttttgccaagcactgtgtatagattacctaacctaatttccataaacccggtgaaatgggaccatctttgtcattttacaagtaagaaactaggctcagagagatccagctgcctgaagtcatacaaccaactggttgcagaatgactatctgaaaccatttggtggctgagagtccacctgatgggcttcacatagcaaagtggaaagggcaaattcatatgttcagatgtgggttcagtgtgggtagggaatagatacagtgggtggtcgttgggaattgtttcctatggaagcatggaggcactcttccaatacttgaagtgattgtagtttgagcacatggagactatttgggatctaatcagggaaagagagcagtcagcgttcagaaggtgtcagcataactgcctacggttgtgagttcccttcaccgctgttgacaagcttcgctgactgactgtcctcgtttggcaaatatagagagaacccatgtagtagtggcaggctgctggggtggcaagagatctttccacctttggtggtaaagtggtggacagaggcaggtatcttaatcactttgggctactctaccaaatgaaccagaaactgttaggctaaatgacttaatcctgagttcggaaggctaggaagagacagagcagaaaaggagagctgtagtttgtttctctcatgttaggacattgattctgtcaaaagaactctaccaccatgtcctcagctaaatctaaggacctcttaatatggctgtgcctgcccattatcctggccattgagctatggaggcaggagaatctcaagttggaagatttaaaaggtacatagacattcagttatacaggttgtattcatttgatagtcagatgtaaattagttaatgaagtaagtccattgttccatttgctttcgtttgtgacctctccttatattttatattcaaactttatgtgcggggggtatgcacacctgtggaggttagaagacagcctgcctgccggagatggcttcttctaccatgtgagtcctggagactgaactcaggtcccaaggcatggcagcaggtgcctttatctgcttagccatctgccagccccttgcacctctttaagtgaaaatgtgttgaaatatattcatatgccataaactcagccttttagaatgtaaaatgctttatcatctttacaaggtcatgctgccatcgctgccctctagctccatgacatttgtcatcccctaaacaaaaccctgggcccatcagtgctttctggacccgtctcccctaaccgactaccgactagaaccttgaacctgtggttgtgttttctacagctctcgtggcgctctccttcagtggggcaattgggctgacttttcttatgctgggatgtgcgttggaggactatgggtaagttgtcttgaaaaagaaatcataatgtgtatgtgtccatgtctg

SEQ ID NO: 869 - DNA, 5163 bp, Mus musculus
cctcactccaaggaaggaagaagggcaaacctaggctccagatccggttccatgccatgttttggaagtcgtgtttacgtctgccttcatcctcatcccttccgcttcagcataagcaaaattataaccctgcacgctgacttgtatgctattatcatagcctggctgctcctgcgttgagggacttcgcccccgggatcgctgactgtctgtgaatgacaaatccaaagtcaggggttgcagagtcagccggacttgcctgctctcgtgcagcagcgggagaaaacagaatgaaagattctgaaaataaaggtgcctcgtctccagacatggagcccagctatgggggaggcctttttgacatggtgaaaggcggtgcagggaggctattcagtaacctgaaggacaacttgaaagacactctcaaagatacatcctccagggtcatccagtctgttagcagctacacaaagggagacctagactttacttacgtcacctccaggattatcgtgatgtcctttcctgtggatagtgttgacataggattcaggaatcaggttgatgacatccgtagctttttggattccagacatcttgaccactacacagtatacaacttgtcacccaagtcttaccgaactgccaagttccacagccgggtctcagagtgcagttggcccatcaggcaggctccaagtctacacaacctgtttgctgtgtgtaggaatatgtataactggctactgcagaaccccaaaaatgtctgtgttgtccactgcttggatggacgggccgcgtcgtcaatcctggttggtgctatgttcattttctgtaatctctactccacgcctggccctgctgttcgattactctacgcaaagcgaccaggaattggactgtctccgtctcacaggaggtacttaggctacatgtgcgacctacttgcagataagccctaccgccctcacttcaagccactcacgatcaaggcaatcactgtcagcccagttcccttcttcaataagcagagaaatgggtgccgcccttactgtgacgttctgattggagaaactaaaatatattcaacgtgcacagactttgaacgaatgaaagaataccgtgtccaagatgggaaaatcttcatccctctgaacatcacagtccaaggtgatgtcatcgtttccatgtaccacttgcggtcaaccatcgggagccggctgcaggcgaaggtgaccaacacacagatattccagctccagtttcattctgggtttataccactggacacgacagttttaaagttcaccaagcctgagctggatgcatgtgatgtaccagaaaaatatcctcagctgttccaagtgacactggatatagaagtccagccccaagacaaagtgatcgacttaactccaccatgggaacactactgcacaaaagatgtgaaccccagcatcctcttctcctctcagcaggagcatcaggacactctggccttaggggatcagaaatcagagaagtcacgctgtgaggaggaccacgctgccctggtgaatcaggaaagtgagcagtcagatgatgagctactgactctctccagcccccatggcaatgcagagggtgataagcctcatggagccaagaagccaggcaaaaagcagcaggagccagctgcgcctcctcccccagaggaagtggacctcctgggcctggaagggtctgatgtgagcacgaacttctcttccttggcagctcctcccagcaattctgagttgctgagtgacctgtttgggggtgtaggtgccacaggtcctgctcaggcaggacaggctggggtagaagatgtgtttcatcctagtggacctgtgtctgcacagtccacaccgcgccgaaccgccacctccgcctctgcatcgccaaccctaagagtgggagaaggtgccacctttgacccttttggagcccctgctaagccaccaggtcaggatttgttgggctcctttctaaacacatccagtgcttctagcgacccctttctgcagcccacgagaagcccttcccctacagtgcatgcttctagtactcctgctgtgaacatccagcccgacattgctggaggttgggactggcacaccaaaccaggaggttttggaatggggagcaaatccgctgccaccagcccgacaggctcatcacatggcacccccacccatcagagcaagccccagactctggatcccttcgctgacctggggacactaggtagctcttcatttgccagcaaacctaccaccccaactggattgggtggaggatttccacctctcagctcaccacagaaagcatccccccagccaatgggtggagggtggcagcagccagccggctacaactggcagcagacacagtctaagccacagtccagtatgcctcactcctcccctcagaaccgacccaattacaacgtgagcttctcggctatgcctgcagggcagagcgaacgtggaaaaggatctactaacttggaagggaaacaaaaggctgctgactttgaagatctgctttctagtcaaggcttcaatgcacacaaagacaaaaaggggcctcgaacaatagctgagatgagaaaggaggagatggctaaggaaatggatcctgaaaaactaaagatcctggagtggatagagggcaaagagagaaacatcagagctctgctttccacaatgcacaccgtgctgtgggctggggagaccaaatggaaacccgtgggcatggcggatctggtgacgccggagcaagtgaagaaggtgtacaggagggctgtgctagtggtgcaccctgacaaggcaactgggcaaccctatgaacaatacgcaaagatgattttcatggagctaaatgatgcctggtctgaatttgaaaaccaaggccaaaagcccttgtattaatttgtgagcttttctatgctggctgcagtcctgtgataatgcttagtgtgtaccacagttctgagattttcacagatgaaccaaaaattctagtaatgtatttccaatactaaactgttaatttcctcgtgaattcacttctcatgataaggaatgtgaacgtttggtttcttgaagtccatagcaccaagaggaactctagtgagctgaccttgcagagtcttgacattccagcctgtcctttgggaagccgactcagcattttgcctggggaaataggacctcggccacccaaggtgaaggcatgacatccatctcactgtctgagattaagatttatgagtggacattatgataatgggattgcgtaatggttttaaggaattgatttagggattgtgtatgtgtgggttttttgttttgttttgtttttaaagatgtaatttgaggaatggctttacacaaactccaagaatatcaccaaccaagtattttttaatggaaacttactgaagcctttagcttcttcagtgtgtgtcctttggtcaagagcattaacaattattgaagtgacttaacggtggaaaggggttatgtagaaattgaggaattacccctttcttttcctggatgagctataacccaagcacatgataaagaaatcaggagccctaagatgccaaatcttgactccaggtcaggacattggggtaccagctcctttttcctttaagtttgctgttgattgaagaaaaactcttgaacgataccaccaccataattccaaacctatttgaaatccccttctaattgttgccatgaggctcagtgctctttcttttgcttagccaagaaaacattcttcatgggtgacagtttgcaaagcagcttggcccattcacactttgtatagacctggcattctggtgactgcaagccaggggaaaaacagagaagataacactgagtgctatttagaagggtttggttggggatagagctgtggtgtgccttcagatccaattggatagcttgccagttgaggagtcagagtcccacccacccagtggatctggcccctcccaccccgggattatctccgctgggtttgctgttggatgcatgtgaaaactatgcaagaatgaaactttcccagactgacatcagctggtggcagttcactccagtgctcagagcttcccactttgcaggggaagcagctcctactgctgggacttcgctaggtctctgggtgagcacatgtgcggcatctatttatctatccatacctgcatatgaatatgtctaacgtgcacacacacattcacaaagcaggtggtcaaaaagattatcatgctgatcttaaaaggttcacattcaatattgtgaaaagctttcagaagttgtgtttccaagacaatcattttgtttgtttgtttctgttttaatattcttgtgacaactaagttgaaaaagcagcatgtcagaaataattttgattctatatagacctcttctctttttttaaattataaaagtttattatttattttacctttaactgataatgtgaaattctcaaaaatatgttctctttaaaatatacagttgtaaactcttcaaagtaaacataacaatctaggtgttatttattaacgtattatacaatgatgtctgacccagtatgtgcttgtcctatttaagattggaatgtgagacatgttgctgtgacctgttttgttttgtttttttgtttgttttgtttttgcctcattccatatttgtagatattgtgtgaactacagtatataatgacaataattaagaggatattatgtggctgtcacatacattttgagatgatagaactatattagctttgtgtcatgtttgcataggtcattaacgttcacggtttaaataccattaaatgttatgcgattagcaatgaggaagaacccttccttaaatctgggagtttcccaccgctctttccctgatgcattatgatcctggacgcctgtctatctcaaaactcttaacacgtgcagaccaataggttctgtgttccttttaaataccaggttgtgacagtttgttgttggccagatccaccatctcattcatatttattgtaatatatttttgttttgtaaatacatgaaacaaaacaaaatgtcattgttctaaaatatttgtaatgtatattaaa

SEQ ID NO: 870 - protein, 901 aa, Mus musculus
MTNPKSGVAESAGLACSRAAAGENRMKDSENKGASSPDMEPSYGGGLFDMVKGGAGRLFSNLKDNLKDTLKDTSSRVIQSVSSYTKGDLDFTYVTSRIIVMSFPVDSVDIGFRNQVDDIRSFLDSRHLDHYTVYNLSPKSYRTAKFHSRVSECSWPIRQAPSLHNLFAVCRNMYNWLLQNPKNVCVVHCLDGRAASSILVGAMFIFCNKTPGPAVRLLYAKRPGIGLSPSHRRYLGYMCDLLADKPYRPHFKPLTIKAITVSPVPFFNKQRNGCRPYCDVLIGETKIYSTCTDFERMKEYRVQDGKIFIPLNITVQGDVIVSMYHLRSTIGSRLQAKVTNTQIFQLQFHSGFIPLDTTVLKFTKPELDACDVPEKYPQLFQVTLDIEVQPQDKVIDLTPPWEHYCTKDVNPSILFSSQQEHQDTLALGDQKSEKSRCEEDHAALVNQESEQSDDELLTLSSPHGNAEGDKPHGAKKPGKKQQEPAAPPPPEEVDLLGLEGSDVSTNFSSLAAPPSNSELLSDLFGGVGATGPAQAGQAGVEDVFHPSGPVSAQSTPRRTATSASDTLRVGEGATFDPFGAPAKPPGQDLLGSFLNTSSASSDPFLQPTRSPSPTVHASSTPAVNIQPDIAGGWDWHTKPGGFGMGSKSAATSPTGSSHGTPTHQSKPQTLDPFADLGTLGSSSFASKPTTPTGLGGGFPPLSSPQKDQPMGGGWQQPAGYNWQQTQSKPQSSMPHSSPQNRPNYNVSFSAMPAGQSGKGSTNLEGKQKAADFEDLLSSQGFNAHKDKKGPRTIAEMRKEEMAKEMDPEKLKIWIEGKERNIRALLSTMHTVLWAGETKWKPVGMADLVTPEQVKKVYRRAVLVVHPDKATGQPYEQYAKMIFMELNDAWSEFENQGQKPLY

SEQ ID NO: 871 - DNA, 171158 bp, Homo sapiens
  misc_feature (1)...(171158): n = A,T,C or G
cggccctgggagcctggatgcctaggcgacgcccgaacccgaccctcggtcgcgggtaccgggaccgctggggaagcgcaggggctgatgtcggcacagtctcctttcctctagcccctgctcgttgctttggctctggacacagggaagccacggtggcgcggcgacacagcctcactgaggttagcttgtccccggcccccagcacctggcctggcgcctgcaatgcagtgcctactgggggaatgaatcagaacccgaggctcccttcaaggtcctcccgccctgtacccacctcctctctacctgcctgcggtgatttcgaagctctcgccacgataaactatttccaagcacactcagtcctgtcctcgccagggcctcaactcacagccaatcactgactcactccattcattcattccacaatttttatcgagcccctccatctgccttggccggagaacacgatgggcaaagcccggatcttggaactacttctagagaggaagacagacattacacacgcaaaacagagaaagcccggtacacattgctatgtgcgcttagagggaatcagtctgctgacagaggaaaaaaggcaggtccccgagcttccatggcaggcggactgggaaggcctctccgaggcattgcaagtcagcggagacccgaggactgactaggagttactctagcgtgaagccgagtaatagagaatagcaagtggaaaggttcccagagtgcctgaattgagcaaggggaaagagagggatgcagggcctggatcgaggtctgggcagaacatgaagaggagttcggattttattctacgtgagctgggaaaacactgaagtgtgctaagcagggaagtgacctgatctgggggctcccggcttttctctgtctgcagtgtccatgctcgcatctcagcctgccggattcctaccctcctgccaagactagcacaaatgcagtctcctcgctgaaatctctgtggttcctgccacctgtaacccctcctttagcatttcgtcacctgtagagcgtttgtcactgttcatctggtattaaagattccacattctcatccatttcatctttgcatcccccacgaggctaagtgcagggcttggtactgtgtagatactgcttatgaatgtgtcttgtcttgtcctttttgtctgtttccatcatctgaggatccttcctctggggggttgacatgccttatttctaaaatggccgaccggatgcagggcagagccagattgcaccaggaccctgccatcgatatagtccccctcacccacccccggtgttttgaggattaaataaattaatgaattaaacgagttagtagttataaagtgttagcacctattaagcattataaaaataaatttgaaaatgaccagcaataattatctttcaaatatttatttattgcattggaaacaagcttttctattggtggttgttagggagactctgcagcttgtcattgtcatcttgccggcttttaagtatgtgttcctactttttaaaagtcagtgcaccaacaaaattctttccatactgtcatcaagaactattgctgaggccgggcgcagtggctcacccctgtaatcccagcactttgggaggccaggcggacggatcacttaaggtcaggagttcgagcccagcctggccaaggtggtgaaaccccgtctctactaaaaatacaaaaattagctgggcgtggtggcatacacctgtagttccagctacctgggaggctgaggcaggagaatcgcttgaacccaagaggcagaggctgcagtgagctgagattgcaccactgcactccagcctgggccacagagtgagattctgtctcagacaaacaaacaaaaagaactattgctgaaacttaatagggccgaaggctgaccactttttatcatgagcttgaatgagatcgatgattgcaacaagtattccttgagtgataattacatgcatagtgttattccagatgttgtgtgaatgcttacaaaagaggaatagatgaatattgccactgtagtaacttggattagaataagtgttctagttttataatttttattttaatttttaaaatctttaaagttccgggatacacatgtaggatgttcaggtttgttacataggtaaaggtgtgccttggtggtttgctgcacctatcagcccatcacttaggtattaagcccagcatgcattagctatttttcctgatgccctccctcccctgccctcaccaccacgggccccattgtgtgttggttccctccctgtgtccttgtgttctcattgttcagctcccacttataagtgagaacaactggtgtttggttttctgttcctgcattagttttataatttttaaaaccagatctttagtgcctatacaaccatctccgcttctgcgttcctgacctagcgtttactcacagcttcccagggctcattgccatcccacacctctcttttcttagataggatcttggctgctcactacattcctctactatctatcttccccttcccccataagccctggggataaagccattataatatctaatgttacatgatacttgacatcttatagaatagttcaactacaggattttgtttagatcttgacaatactcctggaaggagagagggcagatgttatgtatttcccccattttatatataagggaaggtgaaacaagcggcactaagtgatatgctggaggtcatgtgactggtgagtgtcagactcaggcctgcctacctatacaacatgctttctgccacatctccctccacacatgaaaaaacatgtttcaatagctatactcatggaagagggaagtaaaacgaataaatattatgcaataaatctatatctcaattttatttgattttttaaagttaacctgaatttcttatgatgatgttaacatcactttgggcatctagaatcatacactttgacatcacacaggctatgatttaaatctgccactaataaatggcacattaataaactgtgtgatatcagacagcatccttagtctttcaaaaatggagttatatattatctgaaaaatgaggatgacaattcctatgtcatgtaactgtgatgattaaatgcatttctggtacatagaggttcacaaagggctggttatttttaaattaatattaggtttactattgtatgtattaatattaataaaacaaaacctaatatggttgaaaatctagactattcttagaaaatagtctagaaaacctagaaaagtctagaaattattagcaaaccataatattaatatggctgaaaatctggactactattagtatactattgttagtatagaataataatagtctagattttcataagagtccagactactattagtctagattaatgcttagtctagatttcaaccatatgatcacactcaaaatatgtttaaaagttcagtgtgctctgggaagcaaccacagctggaggcttctttgaggaagttaacccttctgggtcaaccagaaggtcttctgcagcagcatccatctttctaccaccttcttctttttcatcaggaggctgcaggggagaaggaacatagcttctagggactcctgtcatcttttcatgctaacactgtgtcctgaacatagcagacattcaataaatatgtctggaatgaaagattcctttcatttatatatatttccaaagagaatgactctgaaatttacactgtgaacatttgtcactaaaaatatagcataaatatctagaaggacaattactgcatcaaagtgtatatatatatatatatagttttgattttgagagatattgccaagttgacctttgtacatttgtgctaattcagtttctgccaacagtgtgtaagctccccgattccttactgaatatggtcagacttttaaatgcttgctaatttgatgggtatgaaatgatattccatgttgttttatattgaattttcttgatgaataatgaagctgagtatcttttcacatgaatattggccattcttgtgtgaacctttgtgaaaggcctattgatgtctttctcatttctttaacttgggttttttttttttctatccattttaggaactctttaaatattctggatatgaattatttgttggtttagaggtctaaacaacttttaaaaatgtacttaatcatgccagtagttctaaatgggaatatgaacaagctgtgctgagttgaaattaaccctccaaatgcttccgtccattccagagaaccatattttactcaaatatcaaagtccgtaggttacagaaaagggagcaaatgacaaaagcattttatgagcagtagacttctctagcccttgaattatggtagataactagccttgagttcctgccaccagaaattccctcctctaaaccctgtggtggttgaggagccctttcctgagctgtggtattctctgggaagacacaggttggaactagagtcagtttccatcagtagatagtattttgcagaacaatttacttggagaagaaagaggacagaatttctgtcacgtcgatcagtggtttattctctcactgccattgtctagccatatgtccctaaaaataagccacattgaatggatgtaatgatccctacccagcctattcctaaggatattagagagatcaaatgagaccataaaaatgaaagggctgtgtaaatacaaggtttgttagccaggctctgggaagtaaccaacactttgtcagagtgggaaaacctcactgacccacaatctttgggtctgtggctctggcccttctcctaccacctgttctgcatacaggtgcatgattgtagagagctgtgcttctccaaggttggtctccagaccagcagcatgagagcagcagcatcagcatcactcaggaccttgttagaaatgcaaattctaggcccccatctcagagctaccagatcacaaactgaggggtgggaggatggggagggataggaggctggaacctggaaatgtgttttaataaactctgcagtaattctgacacatgctaaaggttgagaaccactgacttagtaggatgagcaagggttttacagccagcaaatgtgggtttaaatctcaactctcctacttgccaacttgtgacatgtaaattactagaccgtcttgggtttccaacctctcaccactaaaaggaagaccgagtgtggtgtagcaggtgaagccactctccttccttcccatttcctttacaggactgtgtgagaaataaatgacatgacgattctggactctgctgtgtttagctgtgtgtctcctttggcaagtctccttgcctctctgcctcatttttctcatctgacaaaacaaatggcaagagttaatgtgtgcattgcttttgtcacactatgtgccagccactgtcttaaagagtatgtgattttattttattcttacaataaacctgttttacagctttcattttacacataagaaaaactgaagcagagagaggttaagtaacatttccaaagttatacaactagtaagttgggattcaaacccgggaggtctgctgtgagtccttgcattaaagacaatgcttgccaagtaataagttctcaaaaaatggatgatgatgatgatgataagaaaatagcctggcatatagtaggtactccatataagccatgctgccctcttctgtggctagccctaatcctaaacatctatcccctccccgcagtaagcacattttctttttccttctcacctcttttctggccatttgggtgctctgagcaagccagacagaggcttggctggatgcggaaagaccaaatgtggtgttgcaggtgaagccactctttgggaatgaatgactaagctagcagaagctctagacaagttattgaaagatcatttcatctgcctaatttggaatatatattctgggtctctgcttacctatcaactaatcaagaattaaaatgcctcaaaagttccaagagagtgtaaaagcttttttttttggtgcccagtttttcctcagagtaaaatttgcagctgggaaagtttaatccacagtatgacagcagtgtttttttcctttcatttttgtttttttgctcagacaataaaaagccttattccctttcaattcagggtttcactcgttgttcttgaaaattcccttcagtttagctctcaagatggccttgcttgctgagcatgagtcactggtttagtgactcagagtggcatctaacaagacaaggatgtgcagggttgtcaagggacttagtggccagtggagcctgcctgaagcttttcctaaacccagtttttgagatagagcatcttttccattagcggctgttcctaatcatcctcagtaccagtttatctgaagcttggggtctgacagagacattgccttgttgtggaaagctctagaatccatccttgtccttaactggatgtggccttgagatttactgtgtgacaggacaagacttctgagagttcacccagctctgcttggaacggccgcagaatcaggaggcctgtgcttctggaaatatggtgtcaggagggaaaataaagcctctttttatttgatgaggccttcaaacctctttcaactttaggagaaaaaagatcaattaaagttggatagagaaacagacacatgtgatgaagcaaatatacccaaatatacttggatatggggcccactgtacaattctttcaactttttgatatgtttgaaacttttcaaaatataatgtttggtacaatgcagatacccctagaaatgactacacttttgaaaacattattccttttgcaatataaatgggtgttttccttcccttctcccacttcttttctactcctagcattggtctttttaaaattttggtctagggagccttcttgattaaaaagggcctggaatagttagaaagaatgaataagacctagtacttgatagcacaacaaggtgactagagtcaataataatttaattgtacatgttaaaataactgaaagagtataattggattgtttgtaacacaaaggataaatgcttgaggggatggatactccatattccatgatgtgattattatacattgcatgcctgtatcaacatttctcatgtacctcataaatatatacacctactatgtacccacaaaaattaaaaataaaaaaattttaaaaagggccggagtgagggtggttggtgattggctattcctttatgccaaagacttcatattcttcttcatatgtaattctcacaataatcctacaaactagttattaatttctgtattttatgaggaaactgaagcttaggggaataaacttgacccagttacaaggtaatactactcatcttacagcatttatggagcccttacttgatgtgtcaggctttgtgttatgaaccttaaacctattaacttgtttgagcctcacccagctgtggaaggtgggtaccattattacctccatcctgcagatcaggaaatggaaacttaagagaggcgcagcaacttgtctcagcttatattccaggggctggtacatggcagggcccatgtttgaatccattctctttatttattttttgaggcagggtcttggtctgtcacccagggtctttcttgctctattgcccatggctcactgcagccttgacctaccagactcaagcatcctcccatctcagcctcccaagtagctggaccacaggctcatgccaccatgcccagctaactaaaaaaaaaaaaattttcatagagacagggtctcactatgttgaccaggctggttttgaactcctggcctcaagcgatcctaccaccttggcctcctaaagtgctgggattacaggcgtcagccacctctcccagtcctcttctgctttagagctcttgccctactattcaaatccacgctttggcatttctttgcctactttggtaaattggcatatctagtggaagcctcttgacctgaggccacaggctcctgaggacagagaatgttttgttcagcaccgtgtcattcctagtgttcatagcagtgcctggcaccatgaatattattgaataaaagagtgcatgaatgatggcttctcaccacctactccctcaccttctcagccccccaaagtgctcctcttgggcacattttggctatcctggacttggtccttggagataaagatgccggtttctctgatgtggtttagccaatgtcgcatttggtggccagtaaggagttgtaatgaaggcagattttccttattggtcttaagctgtcaaagacagcagaaagatattatccacagccaaggaaagatgggaaccaaaaacaaatacttaaagtttcccaaaactttcaaggaatcttccagctgtggcaacaagaagtccttagtagccatgaaagctctcacattatagctatgtttgactcttgggttgaagtaatgaacaggtgaacactgacaattagtcctcttaaatgtgcccaggcagttggtaattataccctgcatttatttagtgttttgtttacaaaattctgttctcccttttgatgatatgaacagcccagtacatatataggacagctatgattattcccactttacagatgagaaaactgatgccagagaggttctgtcatttgccctacactacgcagctaataaaaggtagagacagtagagacaggtcttcaacccttttaatgcctagtccaggaaatttttaatatcaatattgcatttaactcagtaatttctgaggatgagtaacaggaagatgtattcctttctgttgctcttcttccaatttagttaggttacgtatttgagtcagttagtctttctggataccagtttgctaatctgtatcatggggaataaacaccatccatcagtgagtatgcatgaagcagaggagactgggagggttcagaacttaaaaaacaatttctgagtgaagctgtttggaagagactgtgatgactcttacctattatccataaaacaaattaaatggcacctcccttggcaaccctacctaaaatggcacccctgttacctcattaccatgtttcatttttcttcacagcatttattgccatttattatatgtctatattacctgtctgaatcctcccaccagagtgcaataaccaagaaggcagggacctgaaaccctaagaggtggaatagtgcctggcacaaataaccacgtgttgaataaatgattgaattaatgaatgaatctgagctgtggaatgattcaaagtaagtttgaattgaatgactgaaagatttacttgaatcctccttgctccccaacagaggggtgttatggtttggcatcctcatacatattcctagtctgccactcaatggcttacaaccagtcactaaagcctccttgagtatcaacttaggcctgggtgaaatgggttcaataacctgtgtccatgcagcagacacagcccattatattgccctgtatgcctctgtactgtaacagcctgtgagcagcgtgaggaccgagggctggtcctgtgcactgttgtatccccagtacttagcatacagcctggtccacagagaggtaaaataaatgttgaatgaatgaatgaaagtacagggctctgaatcctcctccaaagctgacttaccatctgaaaataaacctggtgcatggcacagacattcccctttcaattcagagatgaggaggcgctaaacagttggttccctatcctgagggaaggaaaggcaagcctcggctccagatccggttccatgccatgttttggaatttgtgtttacgtctgccttcatccccatcctttccgctccagcataagcaaaattataaccccgcacaccgacttgcatgcaattatcatagcccgagtgctcctccgttgagagacttcgcccccgagaccgctgactgtgaatgacaaatcaaaagtcagggttgcagaatcagccggactttcctgctcatttgcagcagagggaggaagcagagaatgaaagattctgaaaataaaggtaaggggcggactgcagaaagatggctaagagagggctaaaggctaaaagatgctagggatgcgatgtcactccacagacatatttagtttgtattaatggctagtttaaaattaccatacctatattaacattctagttatataataaacatgatgactttaaaaaatgactagcttctagtttccaaatattgtgtcattcagctttccatttttatagtcctaaatataactctatttttgcgttcttaatcttggctgagtaacacagctttcatagatttccttagactagctcccagatttttgataattttattttgggggtgttcacaatagttaataatgaatatacaggttttcaatgcattattagaattggaatatctgaaataattgggacttaaaacagtttgggttctgaaggcaaacgctgacggagaatcctttaatgaacattaatctttttagaagcgctccatggggagccgtcgctgaccttcagaactgtttatcttgcaaagaaatgctgggatgtaaactacccccactccatcagcctccacaccttacctccccctcacctcccaacactctaattctgttagagggatgggggaagagagaaacgaatttaaataaaaactcaaaaaaggaaagggctaaccgaaaaatgagccaaccaaattttaagttcaacaacaagcattctggaggattctggggttttaaattcggaggctccttaaatattctgccgcagttgggggaggagcgatggacccctaggtctccggaggctacacgtgttccccgatcccgtttccagggggagcccttccttcctattgcgctggtcgtgctcctggcccgcgtgcccaggaagggcgcagcggagtcgcgtgcccgtccgggcggaggacgccgtctccgcgcggcggtgccgggcccctgcttccggaacgctaattttagggttcgccggcccccctttcttttcacccgctttccgtgcgagccgctgcgcagcagtctgcgcttcgagtgcgctgtgttttaaggaggccccggcgctttccccttgggctcgggggcttgggtgcgcaggtgggggctggcacgcagcccgttgggcaggtttcgcgcagcgaccctccccacgccggagctaagttctttgggtgagacgtgcaacaacgcaggccccaaagctctctgcgcgcagcgccgcggggcttggccttctccagtcctcgggagtcagccaccgtctctggcttgttataggattcccacctcgtggtgggcaatgatatatacatattcaacattagaaaaagaaggaaaaaaaaaaacccactcacaatctaatgccaatggagagaatggtattttaatctacgaaactgtaatgaaggctcttaaacaatcccactttccataattgaggctttcaaaagggccaggtagctggtggtgtttgtattaacatctcataggctctggatcattcacagccacgtattgatctatgtggttttgacgtttaaattttaatgaagcagccttagtggggaagaaaacagctatgcatgtgcctggtaagggggaagaggacctgttcattcctgtttctaagccagcatcttaagagtaggtattacctgtgtgtgaaatcaaagtattttaaaattaactctaggaagaatgttggattttcctgtgttgttttcagtggttggagaaagggtttctggagagaaaaaaaaaattgcttatttgccaagtcatgctaggccatggacatgatttagaaaaaaaattaaagctgcttgaattggaggcccaggttaaggttaatattcaacattgtttgaaatggaaacactcctggtttctcagtgtatcagtgtgttttaagctcagatccccagcctttttctaaggagagttggtatttagaatttttttttttttttttgagatggagtcacgccctgtcgcccaggttggagtgcaatggtgcgatctcggcccactgcaacctctgcctcccaggttcaagcgattctcctgcctcagcctcccgagtagctgggattacaggcccatgccaccacgcccggttaatttttgtatttttagtagagatggggtttcaccatcttggccaggctggtctcgaactcctgacctcaggtgatccacccgcctcggcctcccaaagtgctggagttacaggtatgagccaccgtgcctggccggtatttagaatttttgttttactttgtactgggaagagccttgggttgggagtcaagattggtaggctctggcttgttcagttataactcatttgtgacctaggacaggactctatttctttgggtctcagtttctttatcgctaaaatggagagctattagactagattcctgtttttcagattgtgagtggtgagaaagcaacttagtgagtcttaggcaacattttagatcgatgaaatagaacagaaactgtcagaaatcattgcacatagcagaggtaactactgtttcccgaaacttctgttatagatatttatctttatgcatgtgggtataagccgtattctgacatcacatcggtttttttttttcctgtgagtttcagtcaaagaagtttgaggaacactgaaataaatcatagctcagtaatggttttcaaggagtctgtgaaatgcagctttatatgcatatatatacagacagagagagagagaaagagagagtcaatagttttcctcagatttttaaaggattctaagactccaaataggttatgaattactgtatttctaaggtcccccaggccttttccaagcctatttctttgagagcaaagtatccctttagggctgctgggagatgggtatgtgttgacagagaccagataagtgtatggtgtgaggtggtgtgtgtgtgtgtgtgtgtgtaggtgtgaccatagcaaccagaccgtgagagccattcctgggtcccaaattaccagttggtgtcctgaatatgagacataaaaacactaaaaattagagtctctgtgttgaaaaggaccacaacaaaactattaaaatattatgaattgtttggaagtcaattctttttgtaaagactgaaaaagagaatcaggtaaaattataagaggttgatggggcaaagaaatcaccaggatgttgcaggttcagaaagtgaatttttgtaagctaccatcacatgagtggttcagtaaatgttgacttgtgccttaagaactgcctgcctgccttttccatctttttagttcatcttagggacaattcagtgaggtttttaaatacaaaagacattgtgtaatattgatctagcatatctcaaaatgttttgcaagccaggaaaaagaaattaagtataaggcaactaaaaagaaaatagttgagtgagttaataagtagatattggcaaacatgacagctaattataacaataagaaccatagctcctatttaattaacaactgttatgtgaaaagctctctgggaggtgctttacatattgtcacaacactgcaaggtaggtggtattttattctgaagaaatagattaagaattttgtacagggatacatagctagttagtggcagagccatgattcaaaatcaggtctttttttatctccaaaaccattcacatggtaggcaagtacttgaaaataagtagccctgtactctgtaaaattacagtttttaataaaattgtcaacatttttagaattaacttacctatataaaaagggagatgtgaaccttagaaaatgatggcttttgactaattttttaggttgtttttatttggaaaacagatattttaactcttcaaattcagctccaaattttctttttactaagttctttgagtatgttatgcagcaaggtcttagaggcacaaaataataagaatgaagactgaaaatttgggtgaatttttttttggtctataagaggtcaaagaaaatagttctcattccaatttttctgttatttttctagattttattttaaaatggcaaacatggcatttgtttagcaaacaaagttacacataacattttaatagtaggatttaaaagttgtcatgactgggcgtggtggctcaacctgtgatcccaacactttgggaggctgaggtggcagatcacttgaggtcaggaattcaagaccagcctggccaacatggtgaaaccccctctctactaaaaatacagaaatgagccgggcatggtggcatgcacctgtaatcccagctactggggaggctgagacaagagaatcgcttgaacctgggaggcggaggtttcagtgagccgagatagcaagactgcactccagcttgggtgacagagtgagaccctgtctcaaaaaaaaaaaaaaaagttgtctatgccaatggttcctgagataacttttcactggaagttattacaaaatctaattgggtttgagcagggtcagattcagacttttaggctctaaatattaaaaaatagtgtggtgttcatcctccaatctgtaattcaaaataagtgtaaaaaaatttttaaaaagttgtgatttttcttaaacatcttgactactttgatacttttagagaaaactcaaattctttcgaggatttttgtcactgctgcatgtgactgggtgagttggtgaaatgatactttagctggggtgatctgtaaatgactgagtgacttctcaaagcttcaggggtagcatgtggttaagctgggattagagactggtctatgccagtggtaatcaatgggtctggtattgctttttgggctacacactggaaatctgcaggtatgttatttgatggtcatatgattgaggggcgctgccattggcagaaactagaaatgatagtgccctccggtgttctgggctgttccattcaatgatgaattagctcatgtcctgtgcaattttcaaatgttttgctgaagatgtagtaaaaccttctatacttttctgggcttagaacataaattggtttcactgtacactgaaacttccaggattaaaaatgctgtgtaaatctaaggaagattatactgaattttgttcaggaaatcacttacccaaagcaatgccacttgtgttttagacaccagtacaacacacctgaatcataaaatctatatacaagtgcaagtagctacctacttaattatgttttctaatatagtcgtctgagcatttgcatattgaaatacatgttgctttattgtaaataacttatttcacttctcttttacattacagttgaaacgtatatgtatatatatatacatatgcatagtttaattttgtgttaggttatttcatctttaaatttcattttgagatactaaacaagaaaatacaaaatatttttatatgttactcagagtttaaaaatgacttgatttttacccctgaatgttttaaaataatttgaaccaacattaaaacttttggagactataggttcaataaggtatttatggcttctttaataaagattagagcagtctgcaacaatgagattgagctgagtataaattaccctctttaaagggaagatatactgggttataagggttataaatctctaaaagtgatgttactggtcgttgattatttttatgctattgttactgccacttacatttttattttttgttttactattattatttttgagatggagtcttgctctgtcactcaggcaggagttcagtggtgtgatcttggctcgctgcaacgtccaccttccaggtttaagcaattctcctgcctcagcctccctagtagctggaattacaggtgcacaccaccacacccagctaatttttgtatttttagtagagacagggtttcaccatgttggccaggctggtcaccaactcctgacctcaagtgatccgccacctttggcctctcaaagtgctgggattacaggtgtgagccacttggcctggcaaaattttttttaaacattttatttatattctctcagcaggacaatcttcctagcataactgttgagggcccctccagtctcaggttttgaccttgttttttatttttttttattaacttaaaaaacattattattttttcatttttatttttgacttgacgataactgtatatatttatggggtacaatgtgatgttttgatagaaatctacattttggaatgatcaaatcaggccgattagcatatttatcacctcaaatatttatcatttctttgtgatgagaacatttaaaatcctcttttagtaattttgaaatatacaacacattattattaaccccagtcacagtgctgtgcaataggacagcaaaacttattcttctaactgtaactttgtgcctattgatcagcattgcccctttccctgcccatgcccccacctcccagcctctagtaaccaccttttgattctctaattctgtaagtttggcttttttagattccacacacaagtgagatcatatgatatttgactctctgtggcactttagaatttcattttctaattgtttattcctgggatgtagaaatagaattgattaggccgggtgcggtggcttatgactgtaatcctagcactttcggaggtggaggcaggtggaacaccagaggtcaggagttggagaccagcctggccaacatggtgaaaccctgtctctactaaaagtacaaaaaaaattagccgggtgtggtggtgtgtgcctgtaatcctagctactcgggaggctgtggtgggaggattgcttgaactaggaggtggagattgcagtgagccaagatcacaccactgtacactccagcctgggcaacagagcgagactccatctcaaaaaaaaaaaaaagaaagaaatagaattgattttatatgttgaccttatttcagtgaccttgctaaattcacttattaattgcaatagtttttagattttaggggccttactatgtagaccgtttatttttctgtaaataatgacagctttttcttctttctgatccttatactttttcccctttgtctcattgcactagctaggatctctcttataatgttgaatagaagcagtgatggtgagtattcttatcttgttactgatcttaggggaaaagctatcacattttcaccattaagtacaacatttgatgtgggatttatatggacacttaaaaattagattaaggaagttaccttctattcctactgtgctaagtttttatcatgaatcagttctgagttgtaacaaatatttttctgtattatgtgcatcatatgattattttattctgttaatatggtgaatttcagtgattcttgaatgttaaaccaactttgcacttttggaacaaacaacttcgttgtgatatctttttatatattgctgtatttgacttgctaatattttgttgaggattatctttgtccatgagagagattaacctgtgatttccttttgttgtggtgcccttgccacattttggcatcaaggatatgttgaccttgtaaaatgaattaggaagtatttcctatttctctattccctggaaggtttttgtgagattagaattattctttaaatgtctggaagaattcactggtgaagccatttgggcctggaaattttgttcttggaaggttttaaaatatgttttcttgtttgtggtgtttatttattttacttttgtaaagatgaggtctcactatgttgcccaggctgatcttgaactcctgacctcaagtgatcctgccaccttggcctctcaaagtgttgggcttacaggcgtgaaccactctgcctggcttcagttgttttaatagtgtatgttattcagatttcctatttttgtgtgtgttttaataaattctgtttttttaggaatttgtccatttcatctgaatttccacatgaggttttctttatattctcttatgatctttaaaatgtttttaggtggtgtggtcctgtccttgttttttatttctgatagtggcatttctatttattgtcctggtaattctcacttattttgatgcaatattgtcaaggtcttatgcatttgagtagtctctgtaatcttttactggttaattttttgtattatacatttatttttcatctcatgagttcttgcttttgtctttattatttcctcttacacgctttggctataacttatgacttattttttagttttttgagatagaaggtatctttgattttcagcttttcttttaaaaaatattttcatttaaggctacacattaatatcctttaagccggccaggcgtggtggctcacgcctgtaatcccagcacttttggaggccgaggcaggtggatcacaaggtcaggagtttgagaccagcttggccaatgtggtgaaaccccgtctctactaaaaaattacaagtattagttgagcacggtggtatgtgcctgtgatcccagctactcgggaggctgaggcagaattgcttgaacccgggaggcggaggttgcagtgagccgagatcacaccactgcactccagcctggatgacacagcaagactctgtctcaatgaaaaaaaaaatcccttaagctatatatataatatcctttaagcatagcttttgtgtacacctgcaagtattgttatattttcattatttagtttaaaatattttatacttttctttttgatttttttgacccataaggtagtgtaacaacatactttttaatttttaaacagttggggagtttctagttctctttttgccattgatttctagcttgctttcactgtagtcagagaatatattttggatgacttggaaatgttttagacttgctttgtgacccttcatatgatcaatttttatatttatatgttgtacttaaaagaatgtgcatactaagatagtttggttccatgttctatatatgttaattatttcaatttgttaatcctgaggtgcggatcttctgtatcctcactgatttttttctcattctgttggttcccaagagagggcaaactcttccattataattttagatttgtctatttttccttttatatttgccaatttttgctttactttgtggctctgttattaggtgcataccatatacagttatagttgttatatcttcattatgaaatgtctttccttatcttgagcaatactcccttataatctacctttttgatattaatgtagctataccaactttctttgtgttaatagatacatggtagatcttttcccatttgtatactttttcttttttattattattatatatttttttgagatggagtcttgctctgtcatccaggctggagtgcagtggtgtgatcttggctcactgcatcctccgcctcctgggttcaagcgattctcctgcctcagcctcccaagtagctgggactacaggtgtgtgccaccacactcagctaatttttatatttttagtagagacagggttttgccatgttggccaggctggtctcgaactcctgacctcaggtgatccactcaccttggcctcccaaagtgctgggattacaggcatgagccactgtgcccagcctatactttacttttttctatacccatatatgtaatctgtatcttttagaagcagccataagtgaatttttaaaaatctagtctgacaatatggtctttagtttgaatatttaaaccatttaatataattattgatgtgttaagtgctatagctaccatgttactccttgtttcttatttgtgtcccatctgttttatataccactttcttttggattaatcaagcattatttttaactttccaacatattctttacacatttgttttcattttacttttctttgtgtgtatgtgcgtgtgtgtgcctgcgtgcgtgtgcaagtgattaccccagtgcttcttatatttaatcatgtttcagacaatgttaggcgcttagaagactttaactccatttaccctatcttctccctcacctcactttctgccttttgtattattattgtattttgttttaattatacatttattaaagccccataggacactgtaatgattgttttatggaataaatattcatttaaatttacccacatatttaccctattcattgcttttcatttctttcggattttttgtgtattccctctgggatcttttccttttgcatgaaaaaaactccctttaggatttcttgtagtgcatatatgctagaaacaaatattctcagtttttatgatctggaaatgagttgattttgtctttgcttttgaaggacaattttactaggtgtatagaattatggggaagcaggtgttcccccagcactttaaaacatgttatcccattgtcttctggttttcatcctttcttggaaaagcaggctgtcagtcagtcttatgttgttatttggtgttgcatcttttttcttcggctgttgttaagacttttctcaattgatttggttttcaacacttgtcccaggtgtggttttctttgtatttatcctgcttggggttttcagtccttcttgaatctgtgcggcttgaggttttttgtaattctcataattccctgccattatctctccaaacagtgttttgttcctttctctctttctgggactccgggtacctttatgttagaactttttaccctgtcccatatattccttcattttctgtatacttagcccttttctttcttttttagttttgttatttttttgctggcctatcttagagcttactggttctctctgctatgtttaacttgttgttacagaaccattaatttcttaattttgttttgtatttttcagttctagagttactattagattctttttttttttttttgagacagagtctccctctgttgcccaggctgcagtgcgatcctggctcactgcagctttcacctcctgggttcaagcgatcttcagcctcctgagtagctgggattacaggcatgtaccactatgcctggctaatttttgtatttttagtagagatggggtttcgccatgttggccaggctggtcttgaactcctggcctgaagtgatccgctcaccttgacctcccaaagtgctgggattataggcgtgggccaccgcgcccagcctctattagattctttaccaaaagagattcttcaccttgtcatctgttttctcaaatacatacatcacagtcatcttaaaaaactttgctcagtaacttcaatgtgtgggccacttgtgagtctttttatctcttctgtttttcttcttggttgtctttcttcatatgcctggcaattttttattatatgtccagtattgtgtatgaagatgctctggatgatgtcatctacctgttgagagtatttttcctactctttgtcagaagtagaacagagatcacttcaatcaggcactcagtctaattaaggctgttttgcagacttttaaggtttagtctacttctggttctcctaatcccaggcccctagggaaactgactgagagtctgagatgtttctcaccaccccttccccttgacagaccctaaactctaatttttgtctctctaatactgtgaacttgctgaaaactctactcagcaaaatgttcattgtgcttttcatttgctttctcgttggcttcttagcctctgctctgggcagctgagtcaggaatatctgaaggagaaaactcctgtcaggctgtgagttactctaggatatgccttttcagtcctaaactccactttttgtctctgcagcccttgaaactgtctaaaattctgcaggcttctctgtgtcttaacagctgccccttgcctggcttttcagcttcttaccccatgctaagaattggcatataccctaaataggaaaatgggcttgcagaaagtcaggctcacctcagtgagcctcccctctctccaagatctggttcctcaaatcgtggctgattagtagctttcctattacttcacacagatgtttaaaaattttatctggcttttctaatttccctcatcagaaccagtctgctacaacctactctattaaagctggaagttaaacacgtctgtttttttttgtttgttttaagtggattatgttaaaaaataaaaatcacaggccaaaaaccaaggtaacaatgtcattttaaacatgtaaatttaataaaggatatatgttgatttttagttactctttcttgccttattaaaagcttgtcagtaccttttttcatatgtactctgaaattcttacaaatatatgttgctttgttccagagaatatgtgtactaaaagactataatttttctgagtctggttctccattcaaatgttttaatacttttgtgattttatgatttgtaattgtcgactctcacctcccaattcaacatgatcctaaaatgtacaaaataatttgaatgattgagtttcaaaaagttttagaaaacttgatcttgtaacttttattccaaagctttgttgagggggagaagtacaggcttctgcctttaagggtactgcttcacttttggggcaaaaaagcaagggttttcaaagggggacttgacatgaatggcatgcaggggagggggtgagccagtgggggtctcaatgacttgctttggtgctttatctaccaggtggttgagctggtgccctcgcgggcagaactaggtggtaaggtggccagagtcttgagatactctccaagtgggagtgagtttcatcatgggcatactttaggttataatttgttatctctcgaggcagtctcctggtcgaagagacgtctggctctggagcttctaagtaagcaagagcttccaagtaagcacacagataagcttgccctacagggagtgtctggtgaaggaaaggtaaatgttataattgcatttctaaagagctaagtaggaagtggggaacaagggaaaaggaggaaacagaaaagaagaaaaaagtattttttaaaaaagtaattctttctcttagaaaaaggtgggtacttggttacagtctaaaccctttaccgtggctgagtaggtattttttcagcctctttcccaggttgcgtgctgcgtttagtgctgtcattctcatgtgcttcatgtcactgccaatgtgttcagcctctcaaatgcaagctccgttcatttactcattcatctcatatgtttttgatcacttatgtgctcaggtctcctttttcaaatcaatattatggcaattctagtaaatgatcagggaaattaaataggtcaattcatgtgacatagttctgaaaggcaacagagtgattggtggaattgtggaaatgtttttcacatttctccaaattttcttttaaaatcagacaaacaaactgacacttacttttcagtcttttcagatatgttccccgactccgactctagtacttgaaaatgtactaagtaagagggctttgggatgccagaaatagtctgttacttaatctggctgctggtttttaaaccagtgtgtgaaaattcctggagctcagcacatggtttgttcacgtttcagtatgtctgttatactttaataaagaaaatgaactttttactgatagagtaacaaagaaagtgccaaagagaaagaaagcttgagaacctctgatcaagttcagcctcttcatgttatggacgagggaattgaagcttgggaaggaaaaattacctggggactgggggaatgtctcataaccaggacttgtactcaggccttctgactcctagttcatctgactttcctaactcattgatcaggaaaggggtggggaagaatctggcatgcgctaacattggagctgggcgacattctcagaatcccagatgtatcctgcgagtcagcacttcactccctactctttctgccctcctccatccccttccccatggcagtttaaaaacagacacttttatttcctgcaaacctggagatacttgtttcatcacctaagaatcatttgactgcatatgctgagaaaaagggaaattcgtgcctgtgaaatctaacaagagcccagcacaaggtatgtttgatcctcttttaaagccatttttagtttggtgctgtgtggtttaaatttagaataacatttctacaactttgggggaggggcggtgatggtggcgtgcagagattgaacccagctgtgactcctgctgctgtgagataaatgggaaaatctgggaaccagtgttaaaaggagagggctctttagagaggtagctgcagggaaggggacgtgccttaattgggatgggggtggaggtaaggccaagaaacagtgggagctgtctcctccccctcttgccctgtgggatctgacctactgaaaacagagtgaagactatttctgatctggtttggaaatccagaatttaatattaaaatacacgttaaatatttcaataaataaatattaatatgttaatattaatgttaagtcagaatgttaaaatatacatctaatatatatacacatacatgcacatgcatgcacacacacacagcttggaattggtagtgtcatcctggcttcattttacattctcaaaggctagatgttgggtttccagagtgctgtttcttctgcctgaaatacattttctctcctatttgcctggctcagttctgcttctctttccagtagtagcttcctctgactctaggtctccttcccactcgctgcctataacaagtttccagagcatcctgtgttttcccttttgtgtcacttcccgtatttttaattattagatgaaatttgggcacggcatatgtccttaatacatagagaaaagaagagaagacaaggagtcagggaagacaaaagaaagctacccttggatcgcttcttttaaacttagcaaggtagacaggttccttaacttctctgagcctcagtttcctcactttcaaagtgaaaatagtaatacctaataaggttgttgcgagattagaacctaataaggttgttgcgagattagaaataatatattaaaggcacctagcataatatctaacacatagtaggtactcagtgtaacataatttaaaatgtatatatactcttaaaaggaaattatgaaaattcagaaaagcacagagaaagcctgtgaaaacattcattgtcccgtctcttagagataattgctgttaaattcagtggattctttttctgtgtgtatctttatgtatctatataatgtactgagttcagattattcatatttttttttcacttaatatgacggcccaaacactctccacatttttagtgtctgtaaaatactgccatattatattttgtaataataactgggccttcagttattaaaagaagatttagaaactgacacttgatccattcaaactctacttttaccaggacaatatgtttacgtgttaggaggataattcatatccctgggtaaacaaatgatgtagtggacaaggtgcaaaaggactcctccctccattccttcttctctctctctttcagcctttcttgcttatttccatggataggagggttattttgatttttaaagtaatgaggcaactaggtgaaatgaagaaatccattggcctggaagttaggaggtcagaaattttccttcttacagtccagtcactgactcactttaaggcagtcttttcattttttggtctaatttttttcatttgtaaacatgggagaagtgggttttattagagagattttcagactgggcttttctgagtgagtgttagagttctgtggagatgttttttcatattaggtagatttcctctcaagggaaaattacatggctaaaaaaaattaagtttcacgtttcaaattttattttattttttagacagggtcatgctctatcacccaggctggagtgcagtggtgtaatcttggctcactgcaacctctgcctcctgggttcaagcagttcttgtgcctcagccttctgggtaggtgggtgctcgccattacactggctaatttttgtatttttagtagagacgggctttcaccatgttggccaggctggtctcgaactcctgacctcaagtgatgtgcccaccttggcctcccaaagtgacgggattacaagccttagccactgtgcccggctcaaatttcaaattttaaatgaaatctcagtggactttttccttttttaaaattgagatataattcacataccataaaattcaccttttcaaagtgtacaactcagtggtttttagtatattcataaggttgtacagtcatcactactatctaattccataacgctttcatggaaaccattaatagtcgctccccttttcctcctccccctagcccctggcaaccactaatctatttgtccctgcggatttgcctattctggacatttcctgtaaatggaattatagtatgtggtctggctgccttcacttagcgtaatggttataaagttgatgcatgttgtaccctaagtacttcatttcttttttccattccttttagttttttttttgttttgttttgagatggagtctcgctctgtcacccagactggagtgcagtggcacaatcttggctcactgcaagctccacctcctgcgttcacaccattctcctgcctcagcctcctgagtagctgggactacaggcgccagccaccacgcctggctaattttttgtatttttagtagaaatggggtttcactgtgttagccaggatggtctcgatctcctgacctcatgatccacccacctcggcctcccaaagttctgggaccacgggcgttagccaccgtgcccagccctgtttaaaatttttattttactcatttatttattttgacacagagtctggcccagtcaccagggctggagtgcagtggcacgaacatggctcactgcaaccttgaccttctgggctcaagctgtccttctgctcagccacccgtgaagctgggaccacaggtgcatgccaccatgcctggctaattttttcatttttttgtagagacaaagtctcacttttgcccaggctcaagtgaactccagggctcaagtgatcctcctgtgttggccctgcaaagtgctgggattacaggcatgagccttcacacctggcaccattccttttttacagcattttagaaaaaatttttttcaagtttggaaaaaaaaagttttgtcaggctgttagaattcccgtagcagtagaatgcattatctgcagtgtttgttgagatgcaaaaacaatttcagtacttcagacttttaaataaaaggctctatttagttcatgtgaaaacttttaaagctctgcccttcccccttaaagctaagagactgatatactgattgccagtcttgttttcctcctctgggtttaggggaggggattagggccagactttcattggataaaggtagttgaggctggggttaggctcttttcagaggaaaaatcaagatattaacctgtcaccagaaggaggagggatggatggtgggtgggttaaaacaacagatgtcaggtgtacataactgggatggactttatctgctgcactattggtgcaaaatcctttcctcttatgtgtctcctggtgttcctaaggaaagtataaggaagtcacctgcagtttgtagggaatgagctatttactcatgcatgaactgtgttctctagttaaaaagggattgaaaagaagaacaatatcagagtccctatccaaattatgaactccttgaggtcagagattgtgtcttgtcacaattatacctccagtgtttgatatggaacctggcatacatgagtcattcagtgaatatttgtgagattacttggttttttgccttgttgacttaagaaaactttttattttgaaataatcatagatttgtccgagagattccaaagaaatgtacaatgatatcctatgcatccttcatcctctagcctccctgaatgttcacatcttataccaccatagtacaatataaaagccaagacattgacatttgcacaatccatagaacttaaggtttcaccagtcacacatgcactagtttatgtgtgtgtgtttatgtttgtagctctatgctatgtactatgtgaatacatgtaaccttaactaatgaccacggtgatcaagatgctcaaatatcaccacacactctcttgcattacccctttatggccacctccatttcccggtccttaacccttggaaatttagtctgttctccatctttataattatgttatttcatgattttttccagaaatgaaaccatgaaggtatccccaagattgccttttttttactcagcataatttccctgagttgcatccaagtcgttggatgtacaacatgcaccaacagtccattcctttttactgctgagtagtattccctaaaatggatatagcataatttgttaaaatatttatccattgaaagacatttgggtggtttccaattcttagctactaggaatagagctgctgtgaacatctgtgtacaagttcctgtgtgaaagtaagtcttcatttctttgggataaatgcccaatagtgcgattgctggattgtatggtaagtccattttcaattttgaaagcactgccaaactattttccagaggggatataccattttaaattccaaccattattgtatgagtgatccagtttctccatatccttgccagcaattggtatagtcactatttttctttttagcatttgtggtgggtgtgtagtgatacattgactttttgccccttctcctaccaaacaaatatgttaagttttgaactcagcttcccaactctcagtggcctggtctgtgatttccataggcctctatacttctgacctcctcctacctccatgaccttgacctgacttctctttcttctctccccagcctgggtcccggggtcccctttttacctcagaatcgctttatctcaatcctgccatcttcccaatgcctggagaaagtcacaaaagtgctctccactgctgccaggcctctgatgttacagctcctgggcagtcctttcctttacctcagtgatgtcaccctcccacttctgacaggctctgctccatacagtgaggtcttctctcagagaggaccttaccacctctcaacaagagtgagactgttcagtctgaagcccctcagcatctcctttctccatctctgcctttctgtttcttgcagaagccaactcctcatgtgtgcttatgttcccagagagcctccagctccccagggtagggatttatcagaggagtctattttcagacttcccttcgtctgttctccttttcctcagagtgtccttaatggaacacccacacctctcctctagtactgagtctgttgaatcaggatctctggaggtttgcagggcggagagtctctgtttttatcagtctcctcaaggcctccagtggggagtcagattcagagacggctgcctcagggaccctctgggcccctcttcttcacactacccctcagtagtgttttccccaaattttggagaaccaaattattttgttctggactcactgttttttgtttttttttttgagacggagtttcactttttttgcccaggctggagtgcaatggtgcgatctcggctcactgcaacctctgcctcccaggttcaagcaattctcctgcctcagcctcccaagtagctggaattacaggcacccaccaccacgcctggctcattttgtattttcagtagagatggggtttcaccacgttggccaggctggtctcgaactcctgacctcaggtgatccgcccacctcagcctcccaaagtgctgagattacaggcatgagccactgcgcctggctgactcactggttttaactctgtggttttccatctggttcctgcatttctgcccagctcctttaaatttatattaataattgtaattatcaggttgctttggttttgtagtcttattggctcctgctttgcagtgtcatcagtttcatctttacaaactctgatgctctaactttcttgcataaacagcagcaattgctcttctttccttgcacagaggtaggagtgttctcaatatgaccaccatctggtttcccagcctaggttttcacaaatctcctatacatgatttatgtggcccctgaaatgcctggcgtacaattgctcagaccatgttctttttggattttgttattgggcctcatcttattgcccctgccttagaagtacaactcccaattcagtctttggtcaactgaaatttattctttgtcaaagaccctttcccacagtttattccctgcaacgttttatgaattgttgcctgaactagatgttcggttctaacaatatatattacacatgatgccaagcactgttctgagtcatggtcatataaggtgattgggaaatgatcctcacccccccaccagtgttcccaaccatttttcccttctctagtctcccatagctttctctccccgcactatgattgttttttcattttcagctgtattttaggttttttgttttgttttgttttttgagaaagagtctcattccgtcacccaggctggagtgcagtgctgtgatctctgttcactgtagcctctggctcctggattcaagtgattctcgtgcctcagcctcccgtgtagctgcagttacaggcaggtaccaccacaccggctaatttttgtatttttgatagagatggggtttcatcatgttggtaggctggtcttcaactcctggcctcgagtgatctgcccgcctcggccttccaaagtgctgggattaaaggcatgagccaccatgccccactttattttaggtttttgagaggagataatttgtcaaacccagcactctgcctaccacaaaagttgatgtgcaggatatatttacggaataatttaacatatccctctacctccctgccccagcaacttggaaggtcaatgaacatgtgctgaattaaccccactcttgctgtgtgtgtattcttctctcatacaaccaaaacctaacttttgttaattagggttcagcattagccatttgaatagcagaattctaagttatgtagaacagtagttatccttttttttttctttttgagatagggttttgctctgtcacccaggctgaaatgcagtggtgtgatcatggctcactgcgacctcaaccactgtggcacaatccatcctcccacctcagcctcccgagtagctgggactacaggtatgcactaccacacctggttaatttttaaattttttgtggagacagggtctcactttgttgcccaggttggtcttgaactcctgggctcaagcagtcctcctgcttcagcctcctaaagtgttggaactacaggtatgagtcactgtgcctggccagttatcctttttgtttgtttgttttctgttcacctacagatcactttttagggttgaaaagcccatgtgcagaagactacaacagaaaagatggtaggagtgtgttggttttggagtaactctagtgaggtgatgaatgtaaatttaaaatcttaagtatacgaaacaggttactaatacatttgagaaacaataaaggtgctgcttatttatcttttaccatgtgctagaattgtgctaagtgcttagcatatattagctcatttaaacctagtactaatcctgagaggtatgttcattatattgatgaaggccttgaggatcagaattgtgaaataacctgctaaaatcagagagctaatagatagtgtagccaggattcccatataggtttctttgatcccacaacccatgttttctatgctgttttgcctctctagataaaagcagaaactctcacattgtaaagttaatgcttacctaaaatgtatattttgaaagttattaaacttttactgacccatatgaaaatgcctaagtcagtgagtgagtgaaggaatgaatgagtgagagaaagagtgaatgaaagaatagggtagattggaagtaccatatgtactagtctgtcagatatcctaatacactgaaaatcagatatttgtggtggtatatttgtgggaaaattatcttaaaaggattaaaagtccattaaaaatgcaaacaaatgaagtagtggtaatgtaaaaacattgaggggataatgagcttatatacaagatttttaaaaatggatacttaaaagttcatcagtcagtagagtaataagatgctgttgtagttcattttggcctcacttccttatctccttctttaaaagtccttcctcagtacctcttgagtagtggttatttattcctattacaatgtatttcctttcatttattttatctttttagactttggagactaggtccattttattaagcttcaagagattgaatgaagaacagtcactcccccatttacctacctccatttactttgccatttaatctcttttatttatttttttgaggcatggtcttagcctgttgcccagaatggagtacagtggcgcacaatcagggctcactgcagccgtgacctcctgggctccagtgatcctcctgcctcatcctcccaagtaggtgggaccacaggtgcatgctaccatacctggctgatttttgtattttttgtagagacagagtttcaccatgttgcccaggctggtcttgaactcctgggctccaacagtctgcttgccttggcctcctaaagtgtcgggataacaggcatgagccactgtgcctggactaatttcttttaaaagggtgccattacatcccatgaagtgctgggaagaacactgggggtcttagcactgagaatgtaaatgcttatttgaattctgttttcagtgtaatactcagccttgtactctgcctggtgttcccctgtccattgaacctcttgttgccctctccagagaataaatctctagtcttctgttggggttggggaatggcaactgcccatctgcattgtctgaggaaggggatctgggggtctgtcttagtattgccttcacctgtctacattgccatcaaatcctgagtccttaggggattccacactgtaactcagcttgccaggttaggatttagcttaattcattctgtttttattttctaaaatttgttgctgttttctctgaattcataagaaagttttaaaaggtttgaaagaaaagcaatacagagaagcttaactctaacatgaaaaatttataactaatggcaacattgggaaaaagcaagattggcagcatatgaaagtaagaacattgcacaaatgggcatatttagtcagaattcttaggagatgaactgctaaacatcggtttcagaatcctacataatgatttgtgagtgtgtgtatgcccaaagaacattgaatttgtaggcgaaattttaagtacacagaaaagtgtaaagcatttataaagtgaatacactgtgtaactagcatccaaatcaagtaacaggaggttactagcaacccagaagcccctttctagttcctgacaaccctccaacctctactaagaataactaatgacccaatgttttacactgtagattctttttgttcatttttgaattttgtataaatggaatcatttagtatatgatcttttgctctcatttattttgcccaaatttatgtttgtgagacccattgtgtggtagttgtagttcattctttctcattcctatatagtattccattaagggaatatactaatttagttttttcattttggcagacatttccagtttgggtctgctatgaaaagtactactatgaatattcccatatgtgtcttttggtgcccatgtgaacatatttctgttggttatatacatatttctgttggttatatatgttaaaaattactgggtcacatggtatgtgcatattgagctttaatagatactgccaaacagttttacaaagtggttgtaccaagttttactcctctcagcagggtgtgagatttctagttattccacatctttaccaacatttgatactgtcagtcatttaaatttttttttttccccaagatggagtctcgctctgttacctaggctggagtgcagtggcacgatctcggctcactgcaacctccactttccaggttcaagcgattctcctgcctcagcctcctgagtagctgggactacaggcgcgtgccaccaagcctggttaatcttttgtatttttagtagagacggggttttgccgtgttggccaagctggtcttgatctcctgacttctgatccacccgccttggccacccaaaatgctgagattacagatgtgagccactgcaccaggccagtcatttaaattttagccattctagttagtgtatctgtcactgtggtttgcatttgaattttcatgatgactgtgaggttaagcacctagtcataagtttattgggtatttgtatgtagtcttttgtgagaggcctgattatgaccagcacttttatctagactttcccagccaccagaaccataagatacaaatatgtattgtttaagctatctggtctatgctattttgttacagcagcctgagcttactaaggcagaggggaagtgctattgtaccagtaccaaacataggcctaagagcactgtgtcattgttgtttttttttttttttgagacagagtttcattatgttgcccaggctgagatgcagtggcatgatctgggctcactctaacctccacctttcgggttcaagcaaatctcctgcctcaggctcctgagtagctgggattataggcgcccactgccacacccagctaatttttgtagttttagtaaagatggggtttcaccatgttggctaggctggtcttgaactcctgacctcaagtgatccacccgcctcggcctcccaaagtgctgggattactggtatgagccactgcctctgtctgagcattgtatgttaaaacaacacacgtatatatcttacagttctggtagctggaaaagtcaagataaaggtgccagcagattgccaaattttcagctgcgttttctgccttttttgtactgatttgtagattttcttatagatttatattgagtcctttgaatgtatgtattgcaaaaatcttctgtcaatgtggtttatattttcactttcttaatggtgtctttggatgaaccgaaattctttaatgcagtctactttattgatttgcttcacagttcctactttttgagtactgtttaagaattctgtttgcgtcaatatcgtgatattactttatgtaggttttcttctgaaagctttgttttagagtatattgatttttaaaaaatttaaatgcatttgttcacatatcagcctgatctattgaaaaacacttaaacacttaaataagcttaaataataacttttccacaaactatctatgtgatcttcggcaaggcagttagcattttttgttgttgttgtttatttttaaattattacctttcctatggtgctgaagggcagttagcatttgaacttaatttctttaactatagtatgataataataatatccatcttagagtattgttgtaagcatcatgactatctaaatgttagctattattaaaaagtcagctattagcaaagacattttcagagacaattggagatacttagatatagattggatgttagatgacagtaaggaattattaattttgtgttgtgtaggaaaatgtccccattaggaaatgcatcatgaaaaattaagaggtgaagtaaaatgtctcaattcattctttaaaagttcagcaaaaacaataaaatcccaaatatctagataaagcaaacttgcaaaatgtttcaaattattgaattttttgtttgtttgtttgaaatggagtcttactttgtcacccaggctggagtgcagggcactatcttggctcactgcaacgaccgcctcctgggttcaagtgattctcttgcttcagcctcatgagtagctggaattacaggcatacaccaccacacctggctaatttttgtatttttattagagacggggtttcactatgttgaccaggctggtctcgaactcctgaactcaagtgatccacccaccttggcctcccaaactgctgggattacagatgtgaaccaccatgcctagccaaattattgaatttatacattagatatgtagatattcatcatgtgaaattctttcagcttttttggtatgtttgaaattttcataataaaatattcaaggaaagttagtaatgaatctatagcattcctattatttaacattttctccaaagctaaaggtgcagaaggacctaattaaatggatttgagtcacttagcctgttctgcctgggaaaggagattaaaatgaatttaaaataaaatgtgaactatatccctgcatacttgagtgggataaagctgagccataaaaatccaggttttactgggtgtagaaaaaaggagaaggtgaggaaggggtatgagatgtactgagtgctgttaagggtcagatactctgctgggtgctgtaaatatcacctatcattcataaagcaattctacgaggtaagcaatattagaaaagtttgatatgaaaagtttgatagaaaagctttggataacttgactaacacaactagtggatagtggagtgaggatttgtacccagatctgtgtttttgcacacagatctgtttttgcttttcttctttcgttcctactttcctctctccctcccaccgttgtcacttttttcccaccttcactccctttccttcgttcttcctttctttctgacttctttacaaatgtttttattttttatttactttttactttttgagatggagtttcgctcttgttgcccaggctggagtacaatggcgcaatctcaacgcactacaacctctgcctcccaggttcaaggaattcttctgcctcagcctcccgagtagctgggattacaggtgcctgccaccacacctggctaattatttgtgtttttagtagagacggggtttcaccatgttggccaggctggtcttgaactcttgacctcagatgatctacccaccttggcctcccaaagtgctgggattacaggcatgagccaccgcacccggcctggttttttttttttgttttttttttttaatgaatattacgcttttcattgtagaaactctggaaaacacgtttgtattaatttaggttttgctacataataaaccaccccaaacttttttcttttttcctgagacagggtcttggtgtattgcctaggctggggtgcagtggcatgaatgtggctcattacagcttcgacttcctgggctcaagcaatcctcctgcctcagtttcctgagtggctgggaccacaggcacacaccatcatgcctggctattttctttaatttttttttgtagagatggggtctcatcatgttgcctaggctggtctcaaactcctgggctcaagtgatcctcctgccttggcttcccaaagtactgggaatataggtgtgagccattagacccagccagtttttttattttttatttttattattttacactgtgttgagataaccacccccaaaattagtggcttaagacagcatacattcaggtcacaattctgctggcagtaatttaaatgggctcagagggcagttcttccagtctgggccaacctcagctgttgtcattggggctcactcaaacgtatgaggcatcagctgggatgtcaggatcagctcctccatgtggcctcccatcctacagcagactagcttgggcttgttctcttggagaaggagaagaggagccaagagagcaagcagaaatccacaatgctcttgggcctgtgtctggagctggtaaaacagtacttcccctctgcctcagtcagctcaggctgctgtcacagaacatcatagactggatagcataaacaacacacacttatatctcaccattctggtggctgggaaagtcaagataaaggtgctggcagattcagttgctatgaggacccttatcctggcttgcagaaggctgcttgctgtcttctcattgagtcctcacatgggggtagatggggtgtgtgtgagagagagccagagagacagtgagcacatgctctggtgtttcttcttttccttataaggacactaatcccatgatgggggccctacccacataacctcatttaaacgtaatcatcttccaaaggcccccatctccaaatactaccacactgggagttaggccttcaacataggaattttggagggacacagacactccccaacaccctctattgtacaaagcaagtcacaaggccagcccagattcaaggagtgaagaagtgtaccctacctcttggtgagaagaaatataaaataatattgcattgtgatatgggtggcagcaagtgagggtgagtgggatgaatgtttgcagccatttttgcaaacattttttcataacatacaaaaataaacatctactttaagtcatttctaataccattatcaagagctaattattgttaatatgttggtctatgcacaaataggggcagatatgcacgtacagaggcatagttttgtctgtacacatacagaggcagattgcttttaagaatataattttcatttagaatcaaacttatgttctattagtgtattttcccaggtattaaattttccttgaaaacatgtttaccctatgatgcaaaggaaatcaacataaattactatgttccaggcattgtgctaagcactttcactcagttatcttaactaaaaaacaagtttcttgttaatttgcagggttaatttgcatcaaaacaaggaattcatttgttgctacaaagaaaaagcaatgaaaggactttgtgaaaaggttcagagaaaatgataatggttaagacatatcagcaatacccatttttctcttgaaacctgacttgtgaactataacagaaaatacagaagataaatccttgtacctattgcccaccaatccagtctttccattttataggtgaagtcatgtcattatttatgtatttgtttgatttggctgtatttcaggatcatgttgaacatcagttcttattgtatgggtaacataaataagaagcagaaaatgtagagggcaaaggccaaagtttgatcctgggcttgggactgattagttgttgactatgaaaaaaaaatcacttaatttttttgagttcaattttatcatctgtaattacaaaagcttcaatcttcttaaaattggtgtgaagattgactacagcattttatatctgcactgtctgatgtagtagccactggctataagtggctattgagcatttgaaatgtggctagtccaattgagatgtgctgtaagtataaaatacacagtagattttgaacacttaggtggaaaaatatataaaatatcttattgattacatgttgaaatggcaatatattgtacccattgagttaaataaagtgttattaaaattaattcacttgtttattttttaaattcacttgtaaaaatttattttggctgctggaaattaaaatattacacatatggctcacattatatttctgctggacaatgttttgcttaaaaaatgttctctgtacaatatagagtacagcataaatgttagttatagccagaaaaaaagtataggaggtttagttgaatatgtaaggattctaagtggtagcatgatgcttattatttttgctacatttataatgtaagcttttatttaggcatctgaagtttttctttttatgtgttatagagaagtagggatggaagtgctaatccaattatgtgaggaaatcataataacttcagtgtattgagctacagtgatgcaggcattgtgttaagtactgtattaggcaggattcctttgattacaagtgacagagatgcaatctgaattaactaaattgaaaaagggggatcttgtaattgtatgaagcatgggagtgcatctgggtctcctgaatttctagaatataaacactgtttttcctatatacctatcttcctctctcaaatttacttctccctcctcagcagcattgttctctcagatcacttgtctccatatgtcagaaagaatggctccttcaacctctgtgtgtcatctttgctctagggaaggatagactcagacttgctctttctggttttaaatggaaaagtcctgtgaaaaagccatggttgacctagcttggttataggtacctatccctgggctatggcagctctaacccaaccacagaagagaatttcccagaaaaagggaccattcttcttggttgataaaagaataaatgtacactatagctactctagctaatttaatatgtacagccaatcagtagggtagtacctcaatgaacaaatgagaaactgagactcagaaaagttatgtatttcattcaagttcaaatatccaggctggaagtctgggtctgtccatctccaaagcccatgttcttaactaccacactgagaaagttctagtaaatggggtttgtgtcgacttaagttttactgaattatttaataggtctttgctatttttttcctcctatcattgcttcccattgaaagttaagatagattgaggacaagggaactggccccatggtaatactcagtaaatccttatggaattgaaaaccaacaccactatgctctccaatcttgtgaccaaggctataaaggcgttagaaaagcactgctatcattatctttgtaccatgagcttaagacatagttaccactacttggacatttcctttttgtaatttgcagtcttctgccttcttttgaaaacttcttatttttcaccaacacatggttccctatagtctataccacatgggcatagagatttcagaggcaaagatgaaagagtcatactctgttattcataaataaaatatagccaaagggaattttaaaaaatgatgatctgtaagtctttcagaaaaatggtctggagtttgtcagtctcctactcggatcaaaaataaagtcaaagttttcaactaaaataattgcaataggctacaaatctgtttgtctactttaatacagtagaaatggaaagtagaagtaagtgacaactttattggctgaattcatattaagcagtgtgatggaatgctgagaactctgacccggactggtcagaaaaccagtctcctatatgtagctctgtgaccttaatcagtaataagtacaaaggctaactaaccttcattgggtgctaaacagcgtagaacatcttttcataggttgttgactgactctgcccagtggcagtagttattcattcattcgacacatcttttttttttttttttttttgagacggagtctagctctgtcactcaggctggagtgcagtggcgcgatcttagctcactgcaacatccaccttctgggttcaagcaattctctgcctcagcctcctgagtagctgggattaaaggcgcacgccaccacgcctggctaattatttgtatttttattagagacggggtttcaccatgttggccaggctggtcttgaactcctgacctcgtgatccacctgcctcggcctccaaaagtgctgggattacaggagtgagccaccacgcccagcctcattcagcacatctttatcaggcatctaccctgtgtcaggcatggagttaggtaccaaatatggttctgccatcatggagcttacagtctggtgtgggaagtcatacatgtaaacaggcaatttcagtgtagcatgttgtaagtgctatgttagaagaagtagactgttctatgggacctcataaaatgatatcaaacgtggttttgagaaattggatggtttcctgggacatgctgtccatttagggatctgaagggcaggctgggattggccaggtgggggatcacaacaaagctctttgtctggacttagaaagaggttgggaagggggaagtggtgaaggctgagggctgagtcttgagggaaattagctggtcctagaatgcagagtccattatgctgactacctttgactgagggtgataggaaacccttgaatagttttaagcaactgagtcacataattagatctgcattttagaaagctgagatgtgaatcaattttttcatttttctgtcttgattttcttatctttaaattgaaagggatagtctaccctttataactctgtccagctttagtagtccatacatttctcctattttggcaaaacttaatgaaactgcctttgcaaaaattataacagtgagaaaattatgacagtgacagatctgacttaatgactccattttgctattctaaccttcaagctgcccttgttcattgttgggcgcaggctgaactaagtttgggaggaacttagtttaaccttgaaacaaagatgataacagcccttcttgcctgaaaccagactgcccatgtaggactaataaattagctgcaagattggaaatgtaggtttaggagtcctgtagccggaggctgcaagttctgaacctcccccattgctccttggggtaacatcattattgtgaaacctaagattggtctgagatgtttttcagaccttgcattctgaggcaccagctggcgccacccagactggtaatctggcacaaccagttctgcagtgcctcccaggaacagaagacagcaagaagaacccactttaaccccctatgattccatctgtgacccaatcaatcagcactccccactccctggctccccctacgtgccaaatcatcctttaaaaaaaaccctagtgtctgaattttccagggagactgaatcgagtaataaaactctgatctcccattcagttggctctgtgtgaattacactctttctctattacaattcccctgtcttgataaattggctcttatctgggcagtgggcaaggtgaactagttggatgattacgttacttccatgctgattttgagatctgttgggcagcaaggcctaagattacaactagtacttgaaaatgaggcaagttttgtgggtctagggtgggtgaaggtgggaggtgaggtgaggacaagaagctgaatgaatgatgtgttgtttttactgggaaaaaaggaaatgggaaggtatgcagtttcctttgacagtctcctgaagagaaactggttaggaaatagctttggcctctcagcaagcaggtggaatggtactttgccacaattctagtacagatgaaatctgatagttacttcccccaaattatgaagtctggaatttgcttaacggtagtagttaggggtctatacatatgaaaaaagactgaccatgactttttttttttaaccgttcaaagtgtttgttaattatttattaagataaacaatttcttagcccacatattcatgtttcacagatagttcaggaacacaggtacagtgacaaacttctatgtaattcaacccaaagaaatactttatgttccaaaatcactttgtactctgagagatattagccttcctcatctcaaattctttaattcaattataatttctgtagaaatctgcatatgccttctttcttggtcaggccacagcaaacttacagagagctgcaaccccagggttataaggaatgctccaacaatatgaaatgacagatgcttggccagaaggccacacatcccaggttacaccaaggcactgagagccatggtagttattgtccttgacagggatgtcagcatcaacactaatgtctttcccggatgatggagaaatggaccaacttgataagtattgatgctgagtgatacatacaaagaagtccattatatgattttccctacttttgaatatgtttgaaaatttccctaatagaaagtaaaaagatagaataataaaataaaaatacccccacttattacctaagttttcttttagcacaaatggaaaataagtcagactctctcatttggccatattgaagctaatagtctcagaaccactgtgtcataacactgacattttgcttaaagctctgtatcacctttaatggcttaaaatattctagactgtattgagatcatgcaagtagatcaaagaaagagaattacacgcaaaggaagggatagctgtactagggagttcactggtaacagagtcaggggtccacagctctgggctgggtctgtcctgaaaggcagtctctggatagcaggatgagatggagtgatcactggctttggagtcagacacaatagactgagctatgttgaaggacaatgacaaataacacaatagatagcattcattgaaccctcactatatgccaggccttatgctaagctctttatgtactttatgttatgcaattttaataactaccctgtttttattagtattttatggatgagaaaacacaggtttagaggttatcaaatttgtccatgaccacatgaacttgtaattcccagtaaatatttttgtaaataaatatctgaaagtgtccaggcacggtggctcatgcctgcaatcccagcactttgggaggccgaggtaggcggatcacctgaggtcaagagtttgagaccagcctggccaacatgctgaaaccccgtctctactaaaaacacaaaagaattagctgggcatggtggtgtgtgcttgtaatcccagccacttgggaggctgaggcaggagaattgcttgaacccgggaggtgagtcaagattgcgccactgcactccagcctgggcaacaagagtgtgaaaactccatctcaaaaaaaaaaaaaaaaaaaagaaaaaaagtctgaaatccagtggttaatggtggtaggttgtaccccagttagtttggatgcacataacagaaaaaagcaaaataacagtggcaaaataataactaagtagtttgtttttctctcacctctaagtaatctagaggtaatcagtctagggttgctagggctctctggagctcggggttcttctattttactgtttcattgtgaatgtcttccaccctcaaggttaactcatggtccaagtacctgctggagctccatattccaactagaagaaagggagaaggattggaaggacataccacctaccctcctttttaaggatccataccagaaattgcacatattatttttgcttataattacaatggctacaacttagtcctatgtatgcatctagtagattacagaaaacttgcatgtggcaggtccaagacatgaaagagactgaaaaatatttatactatgtggccacatgcccagctaaagggcacagaagcatagaagatggagagcaacattgaggatcactagcaatcactgcttagcccacactcagctgcattccagagttttatctctttgggtatggtaatccttctcacgaaacctttcacattcgaatggataaatacatgaaaaacccatgcacttagtttagtgttcagaaaatgctagttccttccctttaattagatgttgtcaagtgagcagcagtgatttggtgctctggagactcagcaccctaagaatttgttccacctgtgtctggggtggtgactgccttctgcatcaccatcttagaggatttgccccaagttctacatcctctatggcccagcaccctgttaggtacaatggggttgcaaaatgaagcatccagattttaaggatcttgaacataaaatcacacataatgggctcagggccaaacatgggactatccaggatttaggaaaactttcacttcagtgttggtttgcagctgactttgggaaactatttaccacataaaaatttccagtgttttcttcaagactgagagaagtcgatcacagaaccagcccacttgagaagctgaagttttcctacttgtaaaatgacagatgaaaaggactgatgcttccatgagttgctcttgaaatggtaatgtaggtgtatctgtgtgtggaaaaacacactcaaagtgccttttcttattttctcacaacaaaaatcaacacaaattaaaggcttctgtgatcaaatgggcacttccccccccacaaacaaacaatcaattctgcagtggacaccagctgcgtgtcctccaattctgaaactatctaccaggagataagtgtcagataccactgacacagtccccaaaactgctcccccaacctaccacctccactttcagacaccagttgcaagtctgggcctctaaaacttctgatcgaccagattcaagtttgggttcccatgatcccctctttgggttgattaatttgctggagcggctcacagaactcagggaaacacgtttattgggttataataaaggatattacaaagatacaaggaaagggatgccaagctgccatgccctctctgggtgcaccatcctccaggaacctccacttagctatctggaaggtccccaaaccctgtcctcttgggccttgtatgaagacttcattgggtaggcatgattgaagcatggacaactgtgttaaaatgtgattcatggacaaaaagtatatgatctaaacccaataaggcctgtttagactctgtttgtcttctctgtgcagcatttcttcccccagggatggggcaggacaccctctgggatgagggtcttatgacccacaatcagataagagtcctgccttggacaggtgaaagtagggaggtagaacatcagagagagagagagagagagggagagaaagagaaagaggttttgtttactatgtcgagggctatgggagttatacaggaactgtggattttatatataatacgtattatatatattatatatataatacgtattatatatataatatatataatacgtattatatatatttattatatattatattatacatttatatattatgttaatatatacattaatatattatatcaatataatatactattatattgatatattaatatataatatatataatatatatgttacagtataacattgctgtggtttgaatatcccctccacaactcatgttgaaatttaattgccattctgacagtaataggtggtaccattaacaggtgattaggccataaggggtccaccctcatgaatggattaatgccattactatgggagtgcactcttgattaaagggagtttgcctcccccttaacccccttgctgtctcttcctttctttttttttttttttttttttttgagacggagtctcgctctgtcgcccaggccggactgcggactgcagtggcgcaatctcggctcactgcaagctccgcttcccgggttcacgccattctcctgcctcagcctcccgagtagctgggactacaggcgcccgccaccgcgcccggctaattttttgtatttttagtagagacggggtttcaccttgttagccaggatggtctcgatctcctgacctcatgatccacccgcctcggcctcccaaagtgctgggattacaggcgtgagccaccgcgcccggcctgtctcttcctttcttatcctctcttgccttcctgccttctatcatgggatgatgcagcacgaaggccctcaccagatgtaggctccttgatcttggactttctggccccagaaactgtaagaaataaatctctgctctttgtgaattacccagtctcctgtattctattatagcagcacaaaatgaactaaggcaaacgttgttatactatgagcatgtccttgaaaagtcaaggataagttaaatgttagcaaatggaaatgtgttttttaagtgagctcattaaagaaaccagagcgattttttctgtaaactaaagatggcttccaaaataaagttttttggtattttcattcaattagcagatacttactgaacacctattacttggcaggcactgtgctagacctcataaaacatgatgggtgttgtcttcacctgccagagttgctcaaaatacgtgaataataaattgacaaatatattctcagactaatatacggtcaaataataacatttgttacatcggttataaaagttttttaacatattaacatttaagaaatcttggggtatcttaagattgatagtatgtcatactttctttagtagcatatttttcttatgttgtgacttaaaatggatggtttcttagatttgataacatgcagtatttagggctttagtgtttattatgtgcttccatgcgcctcatttgattctttcttctttttttttttgagacggagtctccctctgtcacccaggctggagtgcagtggcatgatctcggctcactgcaacctctgcctcccaggttcaagtgattctcttgcctcagcctcctgagtagctggagctacaggcacgtggcaccatgcccagctaattttttgtttgtttgtttgtttgttttttagtagagacggggtttcaccatgttggccaggctggtctcgaactcccgacctcaggtgatctgcctgcctcagcctcccaaagtgcaatttccataagttgcccaaaccattttccactgaccacacttagtaaggcaggtcagatctaaggaatgacctaaatgtccttcagctttcactttgatcagtggaattgcctctttaggctgcctcagtggccaaagcatgatcagaaagatggaggtttgaatcctaactgattgttgtgtaaccctgggccagttacttaacctctccaagtctgcctcaaaataagaataaaatctttagatttaaggtaggtaaggcacctggcaaatgataaataatcaatggcagttattttgttactattagagcatcaaggaaacacaggtttcatgatattgggttatcttaaagaaaaaaaaaaagccctacctgggaaatttgtcctattttctggaagacccagaaccccatcaaacaccaagaacagatatccccactcctaagaaacattataggaatagttcagattttcttctgttaaatgtcatccatcagctcacccgattttttccagcagacctcctcttctatcttgtgtgttgctttatatgtcgctcttgacagctgctactatttatgcatgcatttctatagcaaaaccttgattaactgggacacagcaaactgtagcacttaaatgactatggttttcccctatggacatcatttggaggagagagggaagtgacaactaaagttttgagaactgaagagaatcatgtaattccacatcttcgattttactgctgagagaaggagaatggatcaaggccaccctgctgattaagagcagagtcaggagaggattctcggtctattttgctttcttctggactgtggcctaaagatgtgtcttttggcatctctcttgggggtatttctccttaaggttttgccactacactgcaggtctcaaactcaaatgcctgcaagggctaactggtaataggaatgagtggaggaggctgagtattctacattgggaagtagtagtgaactatggtcctcagactggagcctatataccctctgtaaaggcatctaaactaaaatgtttttcattttaagaagtacaggaccgacaaaacacatctgggagtcagagatggcttgatgttccccagttgaagtgccttgcactatgtatatctataggccttattcaataaggagataatctggattatggccctcaggcacattgccaaagtaagtttcaatactgtgcattgatttatgtttgttaaaacagaaaattgaagagacgcattttagaaacctgatcataatatattttgtaacagagagaacagagtagaagctctggcttcatttactgtctgcttagccaaaactctttgtggtccaattagccaaatgaattcagatgtcacagtgtataggacattcataattgggaacactaggacctcttagtaccagagattgtcccataacatagacattcaaaaacatttataatcaggacacacagtgagaaatacatttatatcattactgagcagaaacatacacacactcatacatatcacacaaacccaaaacaatattttaagaaacaatatcttactgcgttccaaactctgatgttttccaacctatttcatttttatgaaaatactttataatttactcatcggctacagcatatagtttaaatcactggactaggtaatgccatgacatttttgtttattcattaattcagtagatatttactcaatatctaatgagagcgaggtgctctttggagtgtcatgggggacacaaacatgaacaaaacatggatttttgccctcaaagagtccaaatccaataggaaatacatacacgtgaatatttaaaaactcagggcaaaacaatcagttcacatttgacaaactgcttttatgttatcatatgtcataatgataacaaatctcttaggtaagctgggcagatttaaacttaattttacagatgggaagttgcatttttgaaaaagtgacattttaaaaagaagtggaatgatagtaataatagcatatgttaagcacttattatatgttaggaactaatttacttcttactataaccttattatgatggcattactataatcctcactttacagaggagaaaaatgaggcagagaggttaagtaacttgcccaaagtcatagagccaggagtcattggaactaagaatcaatcataggcaacttcaatttttttttttttttttttgagacagagtctcgctttgttggctcactgcaagctccacctcctgggttcaagcgattctcctgcctcagcctcctgagtagctgggactacaggtgcctgccaccacgcctggttatttttttggatttttagtagatacagggtttcaccgtgttagccaggatggtctcaatctcctgacctcgtgatccgcccacctcagcctcccaaagtgccaggaccacaggtgtgagccaccacacctggctggcaacttcaattttaatcaatgtattatattctctggaaatgaaaatcacagatcaaaatcctacataggtcatggcatacataccttgatctcttagcccaccccaaaagtgatgtggcatctgctgtgacaggatagcatttggaatgaggtgtgtatgaaggggatggggtggaatagagcctggttcctcagtattcctcagtgtcactaatcttcatcaagttaataaagcacctgaaggcagcaagagaaaagacaaagggaatgattgctgtccccagaagagggcatcttatcctttgccgttgtctcatgtatgatgtagtatttttgagataagttatgaagtagtcttgagtttggaaaaccaagagttaggctgtaaatgttcaccttgtgtttgaccagtgccacctcccttaagcccaaattctcattcaaagttacaaagacaattttccattaggatatccctggaaaaaataatatttagcctttattgagcttttcccatttgaaaaactaagactgccaggcgctgagcttaaagctgcacccaagacagaccaataatggtaatagagaacaattgttaagtactactctctctctcaatctgtttctctctctctctctctctctctctctctctatatatatatatatatgttaggtactaatctaattcttctatataatgatggtactcatattatgcttgttttatagagtagaacagtgagatattcattgataagtatatgaatttgatctttagcacagtaaagaaaattttaatgttgaaattggtgcatatccaaatttaggcccaagccctagtttttaggctgttgtaaattaacctagttattgtattttcctgccttaatatgcttcttatatcttcaattttataggattattaatagttatcctgattgactttatttatattaagtataaagataaaattcttatagcccattcagatttttctttacacttgcaaactccagagatagatattgaaaaatacaaaggcatatgtctcatctataatttctttcagcaatatgtctgcaagttgagcaaaaataactgaaagtgctctttttgaaaataataattttcacttttcaaaaatgatcctgtatttatttatttattttttgagacagggtctcagtctgtcactgaggctggttctaaattctattaatccaatgattatagtccagcatttgtcagggcacatgatgaacactaggtatttactgtccctgtgtgtctgtaatgaattaaaagaaaaagtacagagaaagattatttaagatgttatgggaaaagatttactagacttcacagaattattactttagtcaagtaactaaaataattcaatctgacagatttggaaaattgaaagtataaaaatttgttttaaaatttttattgcagtttttcctgccaccattcagattgtttgatcttgttataaatgagcattaactctgatttgcaattcaggtcacaccatacctcatcaaagaatgcagttgggaaagcaactggccaggaagtttaggtttccccagaaggactggaaggatttagaaaacatttctttggacttcttctggttgatgctcttcctacaagaatctgtgtttgggtgatccttgtacaggaaaatgtctcttagtccaatttattttatgtagaactgtgtagagctagagcttcccggaaactttctgagacccaaatcatctggactgaagtctcttagatgctattgtttgattttgtgtccttaggtgattgatataaggacagcaagagaaaaccatgtaagatgagaagaaagcaaagctggctttgtgtatgggctcaagtacattttacatgcacgtacttttttcctgttttggtgaggaaactctgtcaaatgactcttgacgggcgcctcacttagtccctccaagttttagtagagaaaatgataatttttaaccaagacttacttgatcttgacctaagatgatgagaatgagcaatccttctgaaatcttattattttaggtgaaaataaacattcgataattacattttaagacttaccagagtttatccaggttttgttcagatccagaacttatacaatgtcggagtcttcttttaagaatacacgatgacagatacaaaattaggtacacagcttaattaacttcatgataaattctcttctgattatgagttactgctttctttggccagaattgtgaaagaaaaataaggcgtgaggctagaggatggggaaaaaaaatccttgtctatcttgcttcccaagcaggccttcaagctagctaactgaaacagtcttttctccaggtcctaaggtaaatggtggcggatctgaaaatgcgtcggacttaaccttgcccttctccccagtttattcgctcaacaaagagttctaaacagtcacatctgctctctaggcagaacggacgctgcctcctagtattagaatacccaactctttgatatctcccttagggatcatctgattctggagaatgtgcaaaatattgctcttcctttatatcctagcatagatatattctggcacttaacatgcattctttttctgttgaattgagttacaagtcagttctctaggacggttaccgtcctggtggctttggcggaatcttccggtgaaaataggctaagttgcatgaaatgggtgtgtctggattttaccacaagacccctggtcctcaaagcttcgcaggccgagatacctcgcccctttcttctctgtcacacgcgtgcgaacacaccctcccaacccacgtcgtagtagtcccctcccccgaccaccccgccccgtttcccttcaacccccctcctcacgaacctcccctcccttcctacctccctttccttccctccccgcgggccagcggctttggcgctgccctgctgcgcggcggggcgacgcggcgacacctataggattgcttccgggcactcctcagccaggaggtgctggcctggggcccggagctcggcagggccgggcggctccgcggcgttggcccagaggacgcgcgcccccgtgccgcccgcgtctccttccctccctccctcctcccggcgccccgagccgagctcagcccagggcggcggcttcgcctcgcccggcgaagcttctctccggtggccgctccttcttttccctcctctttgcgtcatgtcgggcacttaatttttttttttttttaattccttcttcagccctttccaccttccatctcccttttcgcttcccaggttgattattttctcttttctccgggcttgcccatgagcctcctcgggagctaccggaaaaagaccagcaacgatggttatgaatctttgcagctggtggacagtaacggggacttaagtgcgggaagcggcggggttggcggcaagcagagagtgaacgccggggcagcggcgcggagtcccgcccgacagcctccggaccgcgccagcaccatggacagctcaggtagcgctgcccgaggggagtgcagcgctgagccccgcgcggcctccggagcctcccagtcgcccgggcccgaggcccccccgtggtcccccagccccggtttgcgagagagccgggctggaggcgaaggcttctaataccacctgggtgtcgagtctctaatttctctcatccagggagctacgaaacgttagatcagtcctgaggcccagagactgtagcgagctcctcctaatctctctagactgctgaatacggcagctgggggcggggagggggagggaaagggaggannnnnnnnnnnnnnnnnnnnggggagggaaggaggaggggaggggtggagaagagaggggagcgggtggggcgaagaacggcttgggaggagggctgggagaggcagctgctttcactgcccagctggatgagggggagaggtgaaggagcatgtgcgttgattgtttttgcagcatgcagacggtatttattccaattgttattcttgcaatgctgatgctatttgcaattctgtaaagctctgccacatcttaactcagccgtctgctagggttaatgttacctttctcctgcagtttttaacctgggatctagagctcttttacacagcttttactgtttgcacaatgaaatttatttcatgtgttggctttgatcttgtttgtccttttgcttgagtgtacagatttcataaacctttacatgtagggacaaggaaattcctctaaactttgtatcggggcttgcaactgtcttttataaaaggtttggcaagttagagtcctctcttggaactgctgttggcatttgcgatttcaatagcaaaacagtcatttaatatatccatgttggactaggagtattattatagctatttgcttacttctgcagggaaccaggttcggagaattgtttacagagatatttataattgaagtcctcagtggttcgttctacactggtaactttaatactggacaactgaggattccagaggaaagattcatatggggtcgtttgaacagtaatgaaatcaaactgaatttaaatgccctgctttgcaaacaaatgcttgtttattttaattgtgtaatggctgtccttgggctattattttctattttccttgtcccaaagtgggatgaaatattgtccacagatgctcaaatgtcctgggctgaaaacaaattctactcattgaagctcttattgaagttaaccaagatattgatgggacattctcttagaccattttaaataaaactaaaatgatccccaagggattgatggtttcaggactgtttttttttttttttttttttttttttgaggcggagtctcactctgttgcccgggctggagtgcagggatgcgaactcggcggactgcaaactccgtttcccgggttcaagcgattctcctgcctcagcctcctgagtagctgggattacaggcacctgtcaccatgcccggctaatttttgtacttttagtagagacggggttttgccatgttggccgggctggtcttgaactcctgacctcaggtgatctgcctgcctcggcctcccaaagtgctgggattacaggcatgagccaccgcgcccaggcaggacttttttattgatgttgtatgtggttattcaatgtatgttttttcaaatctgtgatatatcaaagtgtaatccatcttttgactggatgtaatctcctttaaatcttaaaaagattcatgttctctgaatgatgccaccataataatgtttacatgtagtgagcatgtaaacaattgaaatgaaaacaaacatattccaaatgagtgtgaaggagcctcacttcaggaaaatgaaagaaatatgaaatacatatgttttcctttttcatagggattattattttaagagttgaaattggtttttgaaatatgttacattgtagaataagttcaacatacattttctgagcccagctatgtgccaagcactgtgagggaacacagtagtgaatgagatccttctggcctctaggggactctcagtgggggcagtaactataacacagagcagcctatggtaagtcctggatttttgaggattgtctttttcactaaatcagacttttttaataggtggagagaagaataatggattgctttaataatctgttgtgatgggaaagtgtttcattaagaatattgttatctctaaagtgctattgccaggagttgattcttaaacttgatcaaagtggtgttgtgtgaagaggctgcagggattccttttctcctccccttatccatcattcactcctatattttattagggggatattgtggctttgttgtagaagtacagggtatcttacaatgattttgatgcatattttcaactgagaatgatttgtttggtttgaatgaaggattggactctgagagtaggattcttttactagtacaactatatgtcttgcctaattatagttctttcttctaagatcctcaaagtgtggcctgtgcagtgtaaatatatccatttgtttagtatatctaattaagttcatggatcatttctaaagtggcagtaatctgcccatttattcaactgattgtactgtgacatgctggataggatcagtggtttatgggacttttgctctgatagaaatattaatgagtggaaaaaatatgttgacatctcgctacatgatttaaagcttagtcttaataataccttaaacttgtaagactgtttataatagaacacttggacaattctcttatttcatttccccagaattttattaaataggttggggaagcagcatgtgtctgtgcttggagacttgggatcaaacctctgcattattgttactcgctgaaaaacctagtaacctttttcttttcttttctagacagatagctctgtcacccaggctggagtgcagtggtgcgatctcagctcattgcaacctccacctcccgggttcagacaattcttgtgtttcagcccctcaagtagctgggattacaggcgtgcaccaccacacccggctaatttttgtatttttagtagagacgggctcttgccatgttggccaggctggtctcggactcctggtctcaagtgatctgcccgccttgacatcccaaagtgctgtgattacagggtcttgctccattgcccaggctggagtgcagtggtgtgatcatggctcactgcagtctggacctcctgggctcaaatgaccctcctgcctcagcctcttgagtagctgggactacaggtatgaaccaccatgcctggctaattttttttttttttttctttgtagagatggggttttttgccatgttgcccaggctggtctcaaactcctgggctcaagcgatctgaccacctcggcctccctcccaaggtgctcggattacagacatgaaccaccatgcttggcctgttcccatttataaaagtggaatcataagagctgttcttaccacagagctttagttgaggctgaaaacaatataaaaatacatttgcagtttttctttactttgtatcttgccctttcaatttatcatatgaagaaacttattctcagaggtggtaggagacctatcaaaggtagaatagataatgacagccagacttaggtcttctgactcaaaggtttgagtttttccccattgaactaaacttttgggtagacacaatatcaactgattgttgaaatagaaacatttttatctactttgatttcccccctgtttttagataaaagaggggtacatgttcagaggaatgtaatggctttctaagtcaacagcctctcaagtggtagataccagagcagtctcctagccagatgtgacttccagagctctctgccttccctggctcactttctcttcattcaaattattctctagaaaaggttgtcatttaaaggtcatcctgtcatatctcaaaggcactgcactatcccaatgccgaaaaccccctatttctcttgtgtgcaccccacttttcagggaaagtagaaccacaaaagtagaactttcaatattgagctgctaaagtgttccaatattgggcttaatttaccaagttcataatgacaaactgaaaaagagtagtccaattaaaatctggaaacagatattaatactttttaaagaataagtataatgataggtaaggatttctcttttgattctcactttttaggctttgttctatatatttaaatatatagaaattcacatatataaataaacaaaatattgtatatattaaaaaaaaagaataaggataatgaacaatgctaaaataccatgtagtgtgagtctggttggaaacaaaaattacctttaacaaattctattttagttagtgtttaaacacagcatccacattttgaaccaggtttcaacattatgagatacgtgtttggataattgtatacttcatggaagtataataaacatatatgtactaataatcctttcttaagaatatctgcccattgaagggtcttgtaggttggaggcaaagtttatttatataacttattttttattttttttttattttttgagacggagtctcactctgttgcccaggctggagtgcagtggtgtgatcccggctcactgcaacctcttcctcctagttcaagcaattcccctgcctcagcctcctgagtaactgggattacaggcacccaccaccagccaggctaatttttgtacttttagaaaagacggagtttcgccatgttggccaggttggtcttggactcctgacctcaggtgatccgcctgcctcagcctcccaaagtgctgggattacaggcgtgagccactgtgcccagccaatttatataacttatttaatgtgtggttatagtttggatgtttctggataatcgtttaaagatgcaccagttactggattacagaataagatacgtcaatttaagtttcaaatttcaaatgcttggagactgccagatttcatagatttggaaggggaatccctggaaccaaatctcagaaagttggccaggtagccaatggtggacactttctgtgatggagctttagctactggggcagtgtctttgaactgttctcatcagtgcagagttctttttatttgggcaaaatcagcctttctgttctctagatacaaattatgtctaatccttctttcacatggtagcccttagacaacagatttttgagaacaggtactaattctctcttagtcttaattttcctcttttctaggccaatcaaacctaagttccacatgcttttttctctatataaaatgatttccatataattatcctaagctttgagaataatgttttttttttttattattttgcacaacaggggttttcaccaatttttattataaaaggttaaaaaagaattaaagattacagaaaggaataaaatgagaaaagttaagtattctctcccctccctgatcatttaggtccttgcctcagagataacttctactaaaagtttctggaaggactttcaacgtacaacatgagtgtgtgtaaatatatatgctttacacatatatgtatatgtatgtgtataccattagaattataataaaatacaaattcaaagtttaaccatgttcatatatgtacattgttcaataatgcttaatgacaaaaatagctacaatttaattattataattcagggattatgctaaacactgcatatggtgtcacatttaaccctcataagaatcctataaggtaaatgatagtaacggtcatcttatagttgaataaactaaggcacagagaggttaagttgcgtgaggttacacaggctctacttattctatattgagtaaaatgccatagagaaatgcccatacgattgcaaatgaagaatttagtggtgaatttttttatttgcttctttctctgaggcaaggaaaaataggagtgattgagagaaccaaaatgagttcagttgttttttaatcccatgaaagtacaaatatgttttctttacttaaatatagagaatttaaaaacactggaaatgaaaacagcaaaaacagcattgaataaagctgattaagacttgatacggcactgagagaacaatacaattgatgaagcattatacatttttggaaaaatatattgcaaatgaaaatggatccccactgctcttaggataaaatccaaggtattcttaacaggacatcagaagccctttgtggcacctgtgaaagctggcccaacaaaacttgttgtcgctccactggtagatcccctccccagcctgcacctccatctttatgtttttgcatacactgttctctcaactcaggccaacttatcccatagacccctggacacccacttttccaggttatctcctattcattcttcagggtttagctcagatattccttaatcgcaggctgcatgcaatggtcattctccatgctcctcagcagcctttacttccgtatcacagctctcatcacattgagttgtgacatgctgcctggcctgtctctccctctagtctgtaagtaaagttcagagcaaggctgggtcttatttgcctttgtagtcttgtcattgcttggcatttattaggagcctgataaatacttgttggatgcacaaaagcatgaacggattttgaatttttaaaagggcatttataatgaaatatgcccatccaaatctaaaaataagcatacagctaggttttaacagaaatgaggccaggtttgagagaaatgtaactgttggtcgaaagctagaccaattcagtaatgagcattttttcatatgtaaagacactggaagtgaaagaaagatggttaatatatagcctagatccttaacagttttctaatatagacatgtcaagaaagaattagcttaccaaaagattgtgctttttcgaccaacaaatacaatctactgtatgattcatcataaaggtcacttttttttttttagccaaaaaaggaaactcaaaatgtatacaatttttttaatgaactgacaatagatgactttcatctatagatctgtgtatttcttaatcggtgtcattaagttttaatcttagccattttcaggtttaatattaaaagttctttgtatcatctttggccgtctgcagttgtatataagctttgtgctaacttaactgcttttttaaatctgtgctcaccatcttgaactccttttggaaaaaagctatgtttgagatggatgaagaatgctggagtttagattgtgcatttccttgttgcgaaaggtgtaactctgaaaaaactaaattacagttattgtatattaaacagctattcctgaaatttacttggaagcttttgaaagagtagctcagtatctgaggagaagttcttcacggtccaagaaattaggaagttccataacatgtgccaagggatctggcaatttctactacctttagttgctttatcccacatgtcacaggccatagtctagatgcaaaaaatatctttttatttcaataacacatcagaacatagttttaaaagtgctagagatagaaactttaaattaaaattaaaatgcgtgtagtattaacagcgcaaatgtcaccaccaaggaagcaaccagatgagccaatgcctcctgtgcagtgttaagtttgcatgtgcagaaaattactgttgttgtattgtggtgtagtactctacctggtagctggcaagtgtgtttggcatacattgtaagccacttcctaattttagaagtgttatgctgtgaaaaaagtgcaattagaattggagatatttgacaaaagtcagggtgaataaatagtataataatagttatataaagtgcaataggggtgcagaagaaggagccataattttaaccaggaagactaaagaaggccacagtggaagttgatatttgagccagaaatctgtaggaaaagaaagaaagaaaacccgttttgggctttgggctaatgcacagtggcatcatagtgcatggtatgtttagagaattgcatttaggcttgaagctggagcccagatgggtgggaggtgctatagcagatggtgctgggaagataagacccaggtcagggtgagtctgcttgaggaggttggactttattctgcaggcagtgggaggccactgaagatttggagatggggtgaggtagggctgacttatctactaggcacagtgtctagaaaccacaataattttagggtccacaaaaatgtttacattttaattgcctttaaaaatcagaataaaataaataagtataacaataatgaattcatctttattcaaatgcagtcattaaaatatatgttttttttttgtgttaatagaggaataggtccatgaaggtaaaaatgcctacggcctacaaaagtcatactgcagccccagggaaaagagggcaaaatgtgaatcctggagataatttacagctgtgtgaaggatgaatcccaccggtggttcctaactgtgatctggctgcatcagatgtacctgagtaaacacagattccctactatgcagccgtaaaaaggaatgagatcatgacctttgcagggacatggatggagctggaagctgttatcctcagcaaactaatgcaggaacagaaaaccaaacactgcatgttctcacttataagcgggagctgaagatgagaacacatggacacatggcagggaacaacacacactggagcttgtcagggcatgggtggggcgggggaaggagagcatcaggaagaatagctaatggatgctgggctgaatacctaggtgatgggttggtctgtgcagcaaaccatcatggcacacgtttatctatgtaacaaacatgctgcacatgtacaccagaacttaaaataaaagttgaaggaaaaaaaggaaaagaaaacacagattcctgggccccaagcatgtttgatttaggaggaaggggaggggtgtgttggaagacagagcatgccagtggaggaccaggagaacaatcaaattgcagtttagctgatgacctgagaaacaacgaaggccctagccagggcagtgtcagtgagactgggaaaaagtcagcctggggaagcattgcacaggtgaatgacagactgacaaccaaccaatggtggggtctgagatacaggagatacctggatggcagcaggagagaaggtagtatttctagtctcagccagaagtggaaaatgtgatcaactgtttttctctgctgcaagttcaccatgaacatacttgtggaagggctgagaatactgttagcttggcacaagctttcaccaggctttcagctttttggtaggctgcccattaggctgtgcagatgcccaggggagtgctgtggaggggtgtgtggtagaagcaggccctgtgtttgcctggaggaagagtgagataatgggtagaaatgctagaactgaagctctgtggctctgggctgagtccaggcctaaggcccgaggccagtacggtgtctgtatcgggtggccccttctcactgggagagccctagactctggttccttgcttggtgatggaggcacagcaagaataatcaaacacctgagaaacttggaagatgattattgaaaccagaatttttttttcagaattctctggaaaaaataaaaaaaacaaaaaacaaaaaacaaaaaaaccaaaacaaccctgaccccagaaattctcaaggactttcttgtaccagcatttggccacttgagcattgcggcaaaaatcttagcagataatagtcttcatttttccctgatccttattcttattttagtttcttcctcttctgcagtctttccctctcttctcttcttttgtccttctctttctctttcccacccatcttcaacttccttatccctctctcttctcctttgcctcttgtactcatctgctcccctcttctcttttctcctccccttctctctagtcagtgagtcagcatgcctgggagatgtggagccccatgccatatgcagatgactgtagttttgggatatgtgtacgcatgtgacttagctctcagtctgctgcatgtggctcaaaaggtgtgaagactggtgtcactttccaatttaggcaattgcatctggcttacctaaaatttcacttgctgcttcaatcagcaaagtgtttcttccatactgtgacttggtgatgagaggtttcatgagctgcaataccagaggcagttgcatttcattcagatgaaggaatgaattttactaatccacagcccgagagtataagataatagctcaccatttcttcccctccatctctcttactttacctctgtaggaaagcagatctttctcttcttcttccctgttgctgaagcctagatatattgctctattttcaacccttccatgtctaaattagttgaggctgttgagcagtgggagtactagggaattatgagtcaggaactccaaatgtaagctctgactttgtcatttacaagctgtgaccttgggcaagtcattcaaatgagaaaaatcatactgaccctgcctttttcataggcacagtggaatgtgagaatgtaaatgaatgcatttgcagttgatactcttcattcattcattgcataaatgtctcctggctgcctactatgtgctgccactcttctagccatgggggatacagtagacgataagatagataagaccttggcacttatgagtttgattatagtgcatgagcagtgaacaaagatatatggttctatggtatgctaaattctatggagggctagagcaagcagagaatagctcaggatggtagtaggatggggagacctatcttccaggggctggtcaggaaaggcccttctgaggagataatgtttgagctgacacctgaagaaacagaaacaagcaggaaaaagaaagagcagagtgtagggcatttcaagttctaggtacagcaaatgcaaagacctggagaagggggatagctttgtagaaagaagtgtgtacctgatataactggtgcttagtgaactaggagggcatggccacaaatgaggtttgagttgtgtttttaagagactgtttggctgcttgcatagagagagtttgaggtggcttcctaggtattccacattgtaggcaggatttctacatcatagacaaggtcagcaattatactgttcaacactaagtatcagtcttttaaaaatttatttatttatttgagacagggtcttgctctgttgcccaagctggctggaatgcagtggtgcaatcatagctcactgctgcctcgaattcctgggctcaagcaaggctcctgcctcagctttccaagtagctaggactacaggcatgcaccccaccatgcagggctaatttttaaattttttgtagaccagagtcttgctatgttgcccaggacggtcttgaactcttggtctcaaggaatcctcctgcctttggcctcccaatatacagggattacagatgtgaaccaccacacccagcctaaatttaattttttaaagacgatttttttttaagagaagttttatgttcacagcaaaattgagaggaaggtacaaagatttcccatatatcccctgcccctacataggcatcgcctctcccattatcaacatcccccaccagcaacatactttgttatgctctatcatatgcagaacttacaatgatccagtgaagtaggtggtattaacaaaatgtttttgagagaaggttcaattaggttcaatgagcttatacacagtgaaactagcagcagaactcaggtcttctgccatattgggacatgagagagattttcagaagaggaattgacatcttgggcaccctgtagccaagatatatcagctactttaggaagagacaagctggagggataggacaggaaaagttgggttttaattgccagggaaattggtttagattgccttgaaagtatagcaggattttactgtaattattggtcttaaaattcagccattaaaatctcctaacaggagataggagcctggctttgtctctgaatgtgccaggagagaactgtctccattatgcctctcattggcacacagaggctgggaaactttcacacactgtctcgttttgtgagcatttgcagttgtaacagaagacagctctattttatatcttgctttgttttcaagccattgcatgaaagccaggcctcttggctcttaaaaattaacccccccaaacctattttagtttatagcagtgatacaggttaatgaaaagaatatttaaaacaattcagagagtagtataaaaatgaaaataaaaatccatttttttctatcttctcacacagacatggattcttgcatattcacatatacatacatccaatcatatatataatgtacacttgaattcctggaatccatctatacatgctattatataatgtgatgttttatttaacattgtcatagataactttctatattagtacctaaagatgtaccttattttctctaacgattgttttaaattccactgtccaaattcctctattgatagggggtaaatatctttgagcatatatttttatatattgtatatgcagtatacctgtgggaaaaattcctagaagtggaattactaagagaaagaacatatgcagttcacattatgatagatcctgcattgttgctaagaaccttgcactaaattaagtttctaacagtatatgagactacctgttttcccacattcttgtcaaagctgagtattgacaaacttcttaatctttggtagactcatacatgagaaatgatgataatggtttacttgaaactggcattaaaggttgatatttctgtgaattatttttgttttcagaaattaatttgaatagcttttcattaggtaggcaatacatattcaaggcaaaacaatttggaaaatccagaaaacacaaagaaaaaataaaaataactgataaacttgtttttcatgaataaccattgttaacatttaggatatacctttttgtctaatgcatgaagtgtgaatgagaaaattttattacagcagtggggaaagcattggagttggagccagtggttgttctagattcaagtttttaacattgctgactagctttgtgaccttgggcaagtcatttaaatcctctgagcctcagtttcctcctttgtaaaacagataatgccttttaatatgatttggctttgtgtcctcactcaaatctcatctcgaattgtaatccccatttgtcggagaaggggcctggtgggagatgattgaatcatgggggcagctttctcccttgctgttctcatgacagtgagtgagaactgatggttttaaaatgtggacttcctttctcactttctctttctcctgccaccatgtaagacgtgtcttgcttcccctttgccttctgccatgattgtaagtttcccgaggcctcctagtcatgcttcctgttaagcctgtagaactgtgagtcagttaaacttcttttcttcataaattacccaggctcaggtagttccttatagcgatgtgaaactagattaatacaccttccttcctttgttttcttttcttttttctgaagcaggttcttaccctgtcacccaggctggagtgcagtgacatgatcaaagccccctgcaaccttcacctcctggggtcaagcagtcttcccacctcagcctccaagtagctgggattacaagactgcgacaccatgcccagctaatttttaaattttagagatgaggttctactatgttgcccaggttggtctcaacctcctgggctcaaatgagcctcctgccttggcctcccaaagtgctgggattacagacattattgttcaggcacagtgagccaccatgcccagccaataatgcctttcttatcagattgttaggaagaacaaatggaataaggaatagaaaactgctcactgtattccttgccctatagtagataacttgataagtgttggctgtgctgaagttcaagtgaagtaaggcagtgttgagaatatttttcttatcctgaggtttcttcaaggtggagaattttttctcttcagtttacaaggcactgagccttgtctttgttatatccattttgggattgttcataagttttttctctttctttattttgtttttatttttttgagacagggtctcactctgtcacccaggcaggagtgcaaatagcacgatctcaactcactgcagcctctacttcccaagctcaagcgatcctcctgccttaccctccctcatagctgggactgcaggtgcacgccactgtgcctagctaagttttttttgtttgttttgttttgttttttttttaagatggagtcttgccctgttgcccaggctggagtgcagtggtgtgatctccgctcactgcaacctccacctcccgggttcaagcaattctctgcctcagcctcctgagtagctgggattataggcacccaccaccatggttggctaatttttgtatttttagtagagacggggtttcaccatcttggccaggcatgtctcaaactcctgaggtcaagcaatgctcccacctcagcctcctaaagtgctgggattacaggcgtgagccactgcacccagcctctttttcttgttttcccagtgtttgtttaaaagctagttcatgtaaggcagtggttgtcaatgaagggctatttcatgccctcctcctgggacatttggtaatgtctggagacatttttagttgacacaatagtggggggaactgttactggtctctagtgtgtagaggccagggtgttgccaaacatgctacagtgtacaaaacagctcctcacaacaaagaactttcctgcccaaaatgtcaatagtgccgaggtagggaaaccctgatatagggaatatattgaatgtgaattgaagttaatgaacctggtgaagtatgcatctatggactcatcaagctaatggtacttagtggtcggccctataaattgaactataccctacaggaatttctaccaggctgcaggaggttctttgcttttcaggaagatggcgtggaaagcatctaagttataaaagggctgtttggctagggctatcacctggaggcagccgaggtcctagaagtttgggtctcagttttcatggaatacaaggtagacttcctttgttccttcaagcatctattcattcagcaaacactgttaagtgaccagaaggccaagtactgtgctgtgtcagataaaaaaggaaaagaaacaaaagctaagatatttcctcttaaaggagcttagaagacagtatattattgtggttaagaactcagatgtggatctctgctgcgtgggctcaaagcctggctttgccacttctagtttatgtgatttagcctcttgctttaggatggagttgagaatatctaggtcatatgattgtgtgatgattaaaatgttgatgaacacagtgtttaggagagtgtctagctcaatgaaatttgcattcttgtttttgttatttgtactgtactactcctactgctaaggaatcttggagccttatggattttctagtttagtagtttcaagtttgattagtactggattccttttctcaatatagccttagccagactctgagtatataaaatacagatatgcatagcttaatatagccatacgttctgagaaacgcatctttgggcaattttgttgtgcaaacatcatagagtgtgcttacacaaacctgcatggtatagcctgctatgcacttaggctgtaggctatagcctattgctcccaggctacaagcctgtatagcatgttactgtactgaatactgtaggcaattataacacaatggtaagtatatatcaaaacatatctaaatatagaaaaggtaatgcactgcactaagatgttatgatggctgcaacatcactaggtgataggagtttttcagctgttattatcctatgggatgactgtcatatattcaatgtcattcacctaaacatcattatgtgcacatgactgtatatgagaacagcagctcttgttaaagtaagggtgggagtctggacactgctttctgggaccactcccctctctccccacaacagtgttgtctgggagagaacctgggactgtgtagaaccctgtttgccacccagcaatctcatccagtccactcactttgagtgaggaaactgaggcctagagagaggaagtgatttaaaaggaggctaaagcaagacaggagtagctctaatgtacatgtgccaaacacagacagggtgctctatgagggagttcagagaaggtagagatgggccccttcttggttaggttgaggtcttgaaggatgggtaggatttgaacattccagataaagttggaaagagtattttcacaggaagaaatagaatgataaagggatggaggaaaaagcattgtagtctttacccgtttcttagtcagtctatttaaaacatattacttaaaaaccaaaggaaggtagttgtcataaagtcacagagtaattcctggggcccaggggcagtggagccagcccatatgcacctggtaccccagaagtgagcacctcctggaagccccctctccagtgccccatagttcttgtttcccttcctgtgcatttgctctgcccttcactctctctgaagaccagctttattgtcttctctgtgtacatggcttcctcagaggtcctgaatttctatgccactgcttaaagcaaccagttctcaacgatcatctgtctctgaatcccaaattctaaattccaggaggaaagaatccaattacacatataggtattatttgtgtgcgtctcatccaaaattttagacagactagggcatgtgaggaacctgtcttatgttgagatggatggcaaagccctactcaaagatgaaaaaggaggaaaactggccctcaagttgctcttttaccagcagtagaaagaagggtctatataactataacaaagtatgagatagacagtacaggtaaaaagtaagagggttgatgaaggcttcttgaatggggacattagtgctggctttgcagtgtaggcaagatttcttggtggagagggagatgggggaggacattccaaactagaagcttggaagaactttgcatgtttgagtaacagtgagcagttgagtacctgcatatgccagtacttcattcattcgtttagacaggaaatatttactgaggacctagtaaggaggaggatataattatggataaagaaacaaacttaaaatagttaaacggcttccccaagttcatagagaatatgaatatgaaccatatctatcatgtttcaaactcttgttttctccatttatactttttctacttgattctacaaggtcaaaagtgacttagagcaaggttggtggctcatgctttttttctgttttaaatagagaacttttgaaattgtgcattgtccttacatcctaaagtgagaataggccataatttccataactataaaatgatttatgtgtgggtgtatgtttgttttaggggaattgtttggtcaggtgatttctaccatccattctaactcaacatttcatgtctgggtaatattggcaaccagtttgatttaatttattacataattatttataatagaaaaacacttgaaactgcctaaaatgtcccaaaatagaggattggtttagaaaattatgatatgcccatatagtattaccaaatagaatattaagatatgcctatgtagtattaccaaatagaaaactaagatatgcctatatagtattaccaactcaaaaaagttgcttttttttaatggtagagatggtgtctcaccatgttgcccagtctggttgtgaactcctgggcacaagcaattctcccacctcagcctctcaaagtgttgggattagaggcgtgagccaccatgcccagctcaataaatttttaatatgatgggaagatattcaaaatataaaattagtagtataaacaagaaacagtctttatacattgaattaaactacataaacacatacacacatatatttgtatttacataggaaaattattgtaaagatgtgtattagtctaaaaatgaaggaactatcaaaatattacaaaacaatatttgggtagtagatatcagtaattaacaaattttaaatgtgttttgctaaaatctcaatgatgaatttatatttcataactacagttttatgtaactatgttctttatctgcatctacttttgtaactgaaatttttattgaaataattatagattcacatgcagttgtgagaaacagtacagagagatagctgtaaactttgcccatttctcccagtggtatattttgcaaaactctagtgtaatatcacagccaggatgttgacattgattcgttccacctcagattcccctagtttcttgtactcatttgcatgtgtactcatgtgtgtatgttaagttccacactattttctcaactatgtgggttcctgaatcacagtcaaggtaccaaacagttccaacaccataaggaacccccatgttgccatccacacctgccactattcttttaaaaaagtacttgaccccaatgggtcgggcatttattttattttgcttttgcatctgaggccataatggtggaaccttagagttgggaaggacttagcagtcttcttggttcctcaatatagaagttttagaggaggagtgggaggcattttataattctccaccctcctccaaacacatcatcagcttgagctgtcttcccaacctttgccccgtaacacctttgccttggtaatgcaggtctcaagttagatatcatgtccactggaaactcttgtctgaccttctaagtctgggtcaggtgcttctttgtgccctgattatgttctgtattttcctctttgtggcacttttctcattttataattgctcatagataataaataaatagtgaatgggtagatggaggtctggatgagagtcctttcccagtgtctgatgatcctgcaatggccgcttctccttcctttcccaccttgtgagtggcttttgatcctgcctgcacttcggccacagcacttatgtggcaagcccttgtttatgttgattgtgcccaattccagccttctacctgctgatggttccaccaggatgactaacttcatcttctgagcttgtcacatttttcttttccttcatttataaagtcagtaagatgattactttaagtagctatgagcctatattgtgctatgtgcttgatatatattataatagcttcagctctgttcaaaagaggaaatggctacagctgacccagagagcatctggggataaaatggggatagtaaaacataacttgaagtatattttattaaaatatgtataggaatatttttaatattttattcaatataataaatataaatattgtatttatacagtattcccactcatgatcctgaacaacttattattcctgaataagttgttcaggatcgtgtagccagattagtggcagaaatagattcaaatccaaaactgtctgttacaaagttcaccttttttgctctgtctgcaagaaggaactgcatctctagggatctgttttaatttcctgattcttccaagacttagaacatcctctagggacctgtatccaagtctagttcttgactgaaccctctagttaggtagctctggactttggaaggcagccattctattgctggacaagaaacattgctgggatgtttattgatgttcagtggaaatctgcccttcactctctcagttctgtatctaggtggcttgtagttctttcccttggtgcaacatacattcttttgaatttataggtccctcatgctgtacctaaaagggatttttctgggtttacctctttattttacagatgaagaaacttgagtccaaagagagaagccctgtttaacttactgcccttgagttacttgaaacctaatcttgcctttctggcttacctttctctttctagctctttcagtctttcctcatgagatgggttttctttactttttattaccctagtcattctccttatggacactctccagctggcctgtgtgcctcctatttttgaagctgacctcaatattccaaattcgggttgattgcatggagttcaacagaggatgtttaattctgcaaacaatgatgagatgccactatgtaccaggaacatgttgcaatcctctaccatattctgcctttctttttctttgtgcacattgtctacaatatttatgaggctagaggtttggttgcatatgtcacaaaggccatcataacagtggcttaagcagatgaaagtctatttcttttttttttgttttgttttgttttttgagacggagtctttctctgttgcccaggctggagtacagtggcccaatttcggctcaccgcaagctccgcctcctgggttcaagccattctcctgcctcagcctcccaagtagctgggactacaggcgccgccaccatgcccagctaattttgtgtatttttagtagagatagggtttcaccgtgttagccaggatggtctcaatctcctgacctcgtgatccgccagtctcggcctcccaaagtgttgggattacaggcgtgtgccaccgcgcccagccttgaaggcttatttcttgctcatataaaagtcggatctggaatggatgttgtataaagtagctagggtgccaagctgcttctatcatgctgcttttttaatctttagggtattactctcttcttcgtcatctaagatggccaactaaacattagttttccagccaatgtgaaggcgagggaagggcttactttttctctctgagaaacagcgtgtaagttgcagtcttaattccactctcatcccattggccagaacttaatcacatggtcgtacctggctgaaggaaagcctgggaaatgtagtcttttattctggtagtccatgcgaccagctaaaaatattcctaagaagaacaaggaggggagaatggattttggttggcaaatagcagtctctaccatacccctccttcttcagctccagggaaacaagtcctggttggttctttgtagccattggcttcccaggtttatgaagttccatttctaggaaaagtggcaaagcaggatctcccagaaattctcaggattctgtgaaagactgaaaatcagaatctttggtgtggaggtcacaatgataaaaatacctgccatttatttggggcttactatttgtttgctaggcatatgttaacatgcattctcttatttaattttcagatgaatcctagggggcaggtatgataactaattctaaatttacaaaccaagttttccaaagaggtgaaacaacttcccaaggttgtacagcgattacagggtgaagctgccacctgtttatcttagtgcactggagcctgaggtcattgcccactcagtttgatgccagacagaccagagttgctcattaacacttcataaagccctctcatgttcctcataataaccagacatttctaattataacttgagcagcaaatgttgtttaagataggttatgagccccaagttgaagggatggcttttataccatgtttgctgagtatgagctcaggtcagacaaaatattgggtgaccaaattggcaaagaccattgtccctgtattccattttgctgtcagcagtgctcttggtttattttcttttccatgaggaaactgaggcacagagctatcacaggacttattccatgtggtaatgttgggatttgctccacattgttatgataccaagctggaaatcttcattctcctgctgccacatgttccttactctgggggggcctggacttctatttcctcatgtcctggagtctctcagcatgtcctgggacctgggacctggttccaggcctgagtttgccagctttgctgtgtctggttagagatcacaggcttttctggactcttttttgcttatagctttgctttttaaattttttttctcctataaatatggcagatggattacgaatacaaatgttaacgtggggcactcaatgaagaaaggatgtctctatggttaactctcttttccagctccaaatcaggatatgtagactacaggaaggggcaatggaaaccttgatatttaagaataacaaacgtttggtgaattgggtggtggggcacctttctggaggatgaaaaggaatcaattatgcaaagagccaggtagaggtttcttagcaggatgatagcaaaagcaaatgccttaagtgcagaaatgaaaaagaggcaagaaataaactaatatcatgtttgagtcttacatattttggaatttatttattacggaaggagagacagaagctcattatcagcaatgactcccctcccctgaatcaacggcaatttttggacaggcctcaataatgctaggagtaagtgctgtcacgcttgtcaaatatactttgcttaggtatgtttggaaaaatgatcagtgtccttggtgaagtgttattctcttttgcttcattaaactcaccttaggaagtggttaaattgacagtgttttttttgttttgttttgtttccagaattctcttgacatctcccagaggctttgaacataagataccagtgctgtttttgatattagcagtggtttataaaaatatttaagtgactctttcctcttaacgtacattcaaatacttagagggttagaaattagaagattatatcagaatttcaaacctgggatttatagaaaattggagggtgctcaaagatgttctgttggcagaggagttgagttgctctgagaacaatggtggattcttttatttacagtggttacagactcacagatgtgcttccactggccacaatccatccatcactagcagatttgtacattgttccagtttgggcatttgggttctcaatctaatgttaattcacctgctcatattaagaattttaacataccaagaaatgtttttttaaaaacaaacaaaaacaacactatcccccaaattaatagtgggaattgaatagtacattttggccttattactcttctgggctcagcagagatctttggatatgcttccaataacaataaaaataacagcttggtgaaataaatggactcgtaggtggagaaccgaagtactgagaggagttttatcttctgattgcattgctctttggcattgaccatggataaaaaccatcactgctttatttttagtttataaagtacttctatggataacattttacttcagctttacaactgccttgtaaactgggtataattgtcttcatttcacagctgaggagactgaggcttaaaggggttaagtgagttgcccaaggtcacagcatagcaagcaggtgacagcatcgggattccaacccgtatgttattatataaattgtcttaaatcctgaaaacatgatagctttaaaaccttaaaaagcatcagtgccatctttagaacaatgacttaggatttttttttcctccatggatattgctttaaatgtttgaggaaataactgcaaattttgtttcatcctaaccctaataatgctctctacaatgtccctcagctcagaattccttgtgactatttgaagcttcagtctttaatattgccttgtgtttgattatatcatgtcaaaggcagagcctggaaaatcattattaaggatttgtaggttgtttgcatgaccttttaaagtaaaaaggatagatatgaatagaaataaataaaattattttgcaaagtaaccataaggcttcagccatgtctgtatctaatttattcactataaaaagttctactgaagatacattttgacttagatcacataattgagaaaaagatggcaaatttatcgttaggttaatgtaactatcccttctttggagaggatgataacaaaactgtcaaaagaaaaagatgcccagatgagattatacttgcaaaattttgtaggcagatacacaaactgcaagtataacatgtaaccatgtttgacaggagaagtaggagaacatgggttacaaaatccttaagcttgacagcctctggcaaggtggtgaataatgtgaggtcttttaaaatggctttcttgagataaagcacagaatgtaatgcatgcaactttcagaattgttgctggagacagcaaaaatactcttgagacagtgcaggctactgaggaaaatacatgcggtgatccagaagaaagtgagagcacgggctgttgggagaactgcaaagagtttccctgggactggggcaaagatgggtgaaggaggaatgcaggaggtgagaatgggaaggaaagcagttcccaggttattcaaggctttgtaaaccatgtaaccctgtgcctctaaaaatttctatgaacgggagtgataagataaaatttgtattttaacaacatgcctcatccctctggagaggattggaggggtccaaagctgttaggaggctagagatggaaatggcctgaactgagtaagatactaagtaaggagtagtgggtgtgtagaaaggtgggttggatttgggttttgcctataggaacagtgggaggaaacaaggtgactctcagatttctttgtatctacccattcttactccataacctcccatgctgtaaaatgatggtggtggtaacaatgactataaaatttgaaggcctgttatattataggtgtgaaacttctcatcacctacaagataaaattcaagtcttaaaggggcatgcaagcattccataatgtgcttgttgcctatcctaccaccctttggtaaacaccctgtgcagtattgctgaccaatttannnnnnnnnnnnnnnnnnnnaccaatttatagttcagaatctaaggtcagaattaacaatatgtattgagccagatactctggtacaaataacacgtgatcaaatcacacgtatgtctgtcttttttttttttttttctttaaacagagtctcactctgtcgccaggctggaagtgcagtggcacgatcttggctcactgcaacctccacctcgcgggttcaagatattctcctgcctcagccttccgagtagctgggactacaggcgcacaccacccaagcccagctaattttttttttttttgtatttttagtaagacggggtttcaccacgttagccatgatggtcttgatctcctgactttgtgatccgcctgccttgacctcccaaagtgctgcgattacaggcatgagccaccaggcccagcctatgtctgtccttttatggagcttcttttgtagtagatagagacagaaaaaataaaaaccctcaagataaaaagagccgtgaagaaaaaagagtagactaaggagagttcatatagggtgatcaggaaagcatctctgaaaaagaaacatttaaggagaaacctataggaagtgaggagggaagccgcgtggctcactgggggaatagtggaattgtaagtgcaaaggccctgagggaagtacatgttgaatagacgagtagtgtggctgcagcaaagacgcagggagaaaggtaggagataaggcaagaggggtacagaggcctgttcctatagagccttgtaggccattgcgcgagctttgatttttattctaagtgagatgggaaatgattggaaaattttcagcagaagagtaacatttgccttatttcttaaaagaacacctttgtttctctttatgaaccacaccttagggaggcaagggtggaggcagagacagcagtgaagaagatattgcaataattcagatgagaagtgattggcttagaccaggttggtggcactataggcagtgagaaaaggttgattatacctctttgtatgtggtaatataaaaatattatatacatttgtattagtctgttctcatgctactaataaagacatatccaaggctgggtaatttattaaaggaaagaggtttaattgactcacagttcagcatggctagggaggctgcaggaaacttacaatcatggcagaaggggaagcaaacatatccttcttcatgcagcagcagcaaggagaagtgccaagcaaaaggaggaaaagtcccctatgaaactattatatcttgtgagaactcaccactatcacgagaacaggagcatgggggtaactgcccccatgattcagttacctcccactgggtccctcccacaacacatggggattatcggaaccacagttcaagatgagatttgggtggggacacagccaaaccatgtcaacattgtacatgatatatgtagtacctaaatatatatagttttctaaattcaaatatacaaaaaagtaaaaaggggaaacacaggtagaaaccagaaacccatgtccccattactcagcttcgacaattatccactaatgagcaatttcattttttctaaagctgttcttgcccctctggattattgtgaagtagatcccagccataatgtcattaaatatttgaatatgcctctaacatgtaagggcctagctgggcatgatagcatgaacttgtagtcctagttacaggggagactgaggcttggagtgagaacctgctcaatcagtcaatcagtcaataaagggctccttttaaaaaacactgtcacaacattctcatctcatccagaatcttaatagtccttactatcctcaaatatccagcctgttcagattttcctgattcttttaagtgggaatcttatttttgcctttttatagtttgtttgaaccaggatccaaataatgtttatgcattgaagttgcttggttttaaagtttcttctctatgtctcttttgttcctgtgtaatttttgttgttgttgttgttgttgggaaaaaaaaccaggccatttgtactgtagattttccccaagtctagattttgctgactgcatccctgtggtgtcacttaacctgttcctttgtcctctgtgttcccggtagattaaaggcttgatcagacttacattcagattagctttttgcaagactatctcgtaggtcgtgttttgtatttccattggggatatacaatgtgtggttgtttctgttttttgtcatcactgtctagtgccattgttttattaggggctgcaaatgtaattcttactttttttttttgtttgctggactatttctatgaggaaaaactcttcctcatcagatatttggttatcctggagtaaagttcatatagcaaacaaaggaaaaaggcttgattcttaccctttatttaccagttttcaaaaataaaaagtaggtcccctatccttctctgagggtgacttatgaagcttctctctttctctttttctcttcattttattattatgaactcatatttttaaacacacattcatgtttcagtccactgcagttattacagttggccctctggggattccacatctgtggattcaaccaaccctgaatcaaaaatatttggaaaaacaccaagacaacaacaacaaaaaagtacagaataaaacaatgatttgtctagcatttacattgcaatgtaataggtattatacataatctagagatgatttaaagtatatgggaggatgtgtgtaggttatatgcaaatactacacgattttatataaggacttgagcatccttggattttggtatccttgaagggccctggatccaatctctcgagtatatagagggacatcagtattcttactaatgactaaatggaccatctttggtcatgggagcctctgaagctagctcctgaatgcttctaacacactcaagtagtctttgatgctttccttgctttctggtatcaccagatgttccaggctcatcttgtatgttttctgccccaatcttagaatcagccactttttcaaagggctctagttccttttagagggaagtggtgcataaagacctctggtgtgaggggtgctcactgctcctgagctggtttttgtgtctaggccttctcagtggacagagctaggagcaaattttttaaaaggtaaaatacattatggattcacaattatatttctttctcccatgccaaaattctggttctcagttgcaccagtgtaattacttatttgctttgtgccacaatacacagccacagaatcacaataccaacactatcaccaaaacaggttaaggtagttttgttttttgtttttcttttggtggtggtgggggtactggttgtatatattttgctttaagacagttactttgtatcttaaagttacttgaggtagtttctctctgtgtggttatatcatcaatttcatactaagctgggttggtttggctcattttgctatcacttttgaggggttgctttaaaatttatgtttgtaattatatagaatatttacatagtttcaaattcaaatctttaaagcaggttgtattcaaagaaacagcttctgtccctgccccctctaccctgttccctccctcacaggtaactctctttcaagttttgggtttatcttttcactttgtaaatatgtgtgtgtatctatccactctctcttggataagtgggagctctatacatatcttaaatttcggataaaatttggaggtagtacagacactattttctgaaagattggatgtgaggtatgagaatagagttgaagctaatgcccaggtatgacatgattgactgatagaattgaaccacctggccccgagtgcccttctttccatgtggcctggttagcctcattcatctttgcaaactccagctttctttgctctcaggtgctctcctctgtgctccattgatgccctctgcgtcacattatccttcccatatggtcttatatactgttttcatttgtgtttggctgtcagtagactgtgagcagcttgatgtcagacattatgctttcttattctgttttcccaccacctatcacagaacctttcacacagtagaagctcaatagatacctgagtaaataaataggccaggtgtaatgttgggttcttaagaaaaaaaaaatgaggtggatgttgttgtcctatttcacagatgaaggaacaggcactgaaaggtttaagctgcttatctaaagaaacagctaataaattgctggagtacgaacccgaatcttgtctgatgccaaggccacacagctccaactctgtgttctcattcagcagtggcatgtgagactgtccacaattagcctattaattgtgtgacctctgcaagaaagtgagcctctatgtctatttctacatctacgaatgcaagatagtaatggtgtgtacattatagggctgtaaagcatttagaataatgcctcatacatagtagggactcaaatcttagctgattttaggtacaattgttatttttagtagcggaatattagaatactactactaccactacatacaaagccctgtgcttggcactgtgtatggagtcttctttgactcaccccatcttgccttctaggagtttgcaggcaatgtgcatatgcttaaagatttcaagaagggcaactggggagtggtcagtcaacaggcagtcacttgagattagtgccaaatgcagggaaagaggaaagaaggcacttgcaggtggccaacttgttagataatagtccctcacccctgggcttctggggcaaaaataaaaaacagaagccatggtggagatttgaatgcttctgttccaccaatgtcaccattagtggcagccaaatacttcgactccttgtccagtttggtgagactcctaacagtccttgccttgtagcattaataagttgcacaaatcacaatttaatactcacattatatagactctatgagtcatggggtcacccagagttcatgggaccttggagagcagcaaattccacctccacattttatagaaagagactttgtccagagaaggaaagccatatgtttaagggcacactggtatttggaacttgaactctgttggttaaccttatgggtcagatcatgcagattcccaaatgcctggacccttgcctgggagggagtggactctcaatatgcaagagtgctgagagacgagggatgatggctccactgttgtgctgcccacattgtatttggtgagtccaggctcctgctcttatcagaacagcaatggtagctgctggaggaagagctggcctccctcaggatgtagccatttctgctgcctgattcatattgggcaaggtcttctttgggcccttccatagctatagccatctatgtgctattggcgattgcactgagacctctactctgtcaaaaagaggtaaggaagaatgtgatagtgaaagggcatgagatttagagccacacagatctggtttgtgttctgaccccagtgtttcttagaggtgtgacttttatccagtcatttaacttcactggaaacctcaatttcctcctcaataaaatgggcatgataatatccaccacagcaggttgttgtaatgattaagtgtgataatctatatgaagcatttggcagaaaaaaagtgtccaaagaatggtagcttctctgcctctctccccgactctgcctgaccttcatttagggctgtctgtcctctgtcacacagtgtggcatagggctgtggctgtgttattacactttctatttatcagaagctactgaggggtgttgaaagatgtagactttaggctccactctcagagattctgatttgaaagaaatctgaaaatttgcattttttaaaacaggcaccccaggctattctgatgcgtagcctggtacctaggctgacatttaaccttgggaacctcttgcaccactgtttgccagaccccttagcttgggcgggttatgcaacctctctgagcctcatttctgcacctactaactgggactgatagcctgtttagcaaggtccttttcagggtgaaatgaaacagtgtgtgtgaagcatcttgcatgaacctagcacacagcgggagcctggtgaagatgtgaagaccgataccagacaccaaagggctgcattgccttcttccaatctataagctagccgtggccctagttccttctttggaaaccaaacccttgcaatgtatctgtccacctattcttaccattctgtggattttgcagaggacacattgttcatgatggaaagccacctgcttgcctgtcacctgcattttttggagaccctttttatggttattagtgcctgtctttgaaatttcagcacctgtgagctctgattgtgttacctgggatctaaaaaggcagcagaggagaacagatgctgctaatgacttatcagctcttttgtccatagtcttctcaaagaaaaaaggctgtgaccctgggtttgtcagcactgatatgctttcacaccacaaagggacttgacaatgggcaggtttccaagtctgtagagtggttctttgggggaagatggaaagcatatttacagtttggttcttcgggctcatgctctttctccaccttctgtgctctgctgccactacccctggaatgctggtgcatgtggcttttgaacatgagagtcaaagacagcagctattgaccctaaaggctgtgtgtgcctgtggggtgggtgggactgggcagcaagaagaggctgaattaggaaagagcatcttgagccactgtcatcatccctttgtgggaccaagtccgtatgagggaccgcgatcatagctggattgtagttttccactcctgcctgttcaagccttagaaactagttttcattaatttcattgctatgcaatgaatgcatagcagttttccactcctgggtatctgttcttgcaaatatccttagattaatgcagagcagacatcaggccaaggtctgccttttttgttctccagcagtgcttttgggtttgactgtttccttttatgttttaagcttttaacaaatataataggaggcagcaaaatgttgtcagtggaacacaggctttggagtgagacagacctagggaagagcctggctgtatgacctaaatttttgtgttgggtcctgctgtgggctgaatatttgtgtcccctcctttcccagattcgtatgctgaaacctaatccttaatgtggtaatatttggaggtagggcctttgggaggtgattaggttgtgatggcagagccatcgtgaacgagattagtgcctttataaaagagggccccagagaacttgcttgtctctttcaccatgggaggatacagggagaagatggccttctacgaataaagaagtgggccctcactaggtaccaaatctgcaggcaccttgatcttggactttctcgtctccagaactgtgaggaatacatttctgttcttaataagccactcaatttatagtaccttgttacagcagcccaaatggtctaagacaagttctcactttgctcctctgtaaaaaggggataatcaaacttacctggcaacataattgtgaagattaagtaagataatggacataaagcttgtagtctagttcccagggatcaaagggtgcttaataagtgatggctattgctgttatcatcttgctgcacttcaatgcaattgaaattggtttaaaagtgaatagaaacggttggtttcttgacggattcaattcagttcaattaagtgtccttttttagatggcttaccctggtaagtgtcatgctgaatacttgatacagatagaaattaagcactctcttctcgctaagctcttcttgtgcattctcaattttgcgttgcagctttcaacaaaagcatcccctcacccttcccagtgattctaaatttctttatctactcatttgaaggttagtttgactttcaagccttttgagatctgagcatcattcacctttgcggtctcacctctcacccctctctaatataccacccagttctgtgaggaaacaccataatatcttggctctagtatgtaccattgccactgcctgatacacattcctctccatttcagagtcttcctccttcctcctgtgtagtggagacgcaatactcatctgtcagtgttggatgaggatttatgcatataatttttttgtccgaagagcagatggaaccacacagaccagactgcaggaaagagaagagataaacagtagactaccttacctgtggtttcactttccaaggtttcagttatctgctgccaactgcagtctgaaagtgttatgaaaattccagaaataatccattacgttttaaattgtgtgccattctgagtagtgtgatgaaatcttgcaccgtcttgcttggtcctgcctgggatatgcatcatccctttgtccagtgttatgttactgcatattagtcacttagtagttgtgtaagtgatgagattgactatcttggttattgcagtgcttgtgttcaagtcacccttattttacttcataatggccccaaatcacaagagtagtgatgccagcaacttggatatgccagagaaaagctgcagggtgctccctttaagtgaaaaggcaaaagttcctgacttaataaaaaaaaaggaaaaaaaaatattccgaggttgtatagatctatggtaagagtgaatcttttatctgtgaaattgtgaagaaggaaaaagggaattcacgctagttgtgccattacatctcagacggcaaatgttatggccacagtgtgtaagtgctgtattaagatggaaaaggcttcagtttgtgagtggaagacatgaacagaaacgtgttccaattgatggcagttgggtttggtattatctgtggtttcagacatcgactgcaggtcttggactgtatcctctatggaaaagaggggactactgtactagcacctgcattggccagatgctaagtagaaacagaagctgccttgaacttagggaggccctgggtgtacagtgatttttctatgccatttgtggtgccatttctgcagcccaccagggtgcagcctgcagaaggaaagtcacacagctctttcctccctccaggggtccttacaataatgaatgatggcaaagagtcaaagataggatgatgataatgcctactttttattgagcacttcttgtagatacatgcacatgtgtgtatttcattcttaacaagtattattgcaaaactgaggttcagagaggttgcatcacacccttgagcatgaagaagacagggagggtggctgtaataatagggacagtcctccaaagcatgacatccgactcttttgatggttgggcagctagtgtgccagggaaataattatctgtctccttagcaacccccaatatttggcttagttgtcattgatgcatttcagttatcttcatgtcgttaaagaaataggtctcaggaaatttaatccagctagcagtgctatgcctagaattcaattaactccatgatttgcaattaatgagccctcatgccaagattgaggtcatagcattaatcttacttttattttaggatttccactgtcatgatttacagcgaaatccagccaatcttgtcaggattattggagcataattaagccagaaaggcaggcagaacagctagttaacatgggatccagggagggaccacatacctttgcttggtaagcctacctcaagcaggatggggctacatatgaggatttccatctaaggactgtttcccagatgcctgatctgtatacatttcaaatccccatccaatctccaaagaaaatatttccgagtcccagttggtgagcccttgtgagttatgttgttgttaattcaatgctaccacatccacctccacctcaagttgccatttactaagttgtaaatgtaacagacagtgagtgggcttttacagatgatggatttaatatctgtgatgattctatgaggaaggtatcataggccttctctctgtataaggttatacagcaagtaagtggcctttccactgaactgatggaaggttgtggcagttcctagctgcagaccatttttgtgcttctctccctttcgtgtgtgtgtgtgtgtgtgtgtgtgtgtgtgtgtgtgtattttgcccattaggatctcctccactttcccatatagaaataagaaggtaggcatgcataggcaaatattgtttatgattgccttctaggtgacaaatactcatccatcattatctcatttaatcatcgtatacatgggaggaggatattatctacctccattttacagttgagaaaactgaggcttagagagatttactagtttgcctgctgttacacagatagcaaggaaggagagtcagtgttgtgaatccaggtatgcttgtttgcaaatcctaggttcttttaatcacaacacgctagtactaaataaatgctttttctcttttcctggttctccaggagtggttattattgagtcgagaatttttgggaaaagtaacacgtggagagtcaatttttgagtggaaggagtctgaagagagggtaggaaccaacctcctactacccaccaggtaagggtgtacttttggcctttgggatttagcccatgtcttctgtatgtagagtgcagatccaggttggctaccatgtctggccaaccaagcacagaagccaacccctcccattgactttacttttgctcagtgtttggtttttccacaagggagggtagtggccagatgtttatgagaaggtctccataagccaagtccacaccagaagctgaccccacagctagcggtagctttctttgccctagagaccagtgaaacagaggagtagcaggttctctttgtacttaggtagcagattttcctccaaatgcttgctgtgggttttttgggttttctcctaggattcaccttcagactgtatctgcctccctgtgtagttagcatttagaagtgtcctcactgggtttgcttagcctcattgaacatttttatgcctggcatggcttactagagactacctattggaagtgcctactaatacaattttctgataatttagatgctgaaggacttccttgaaattttcttcggctggcttgggatggaatacttgcttttgaaatatgccctaaagagtgtgctatccctggggaaatccacttgtctcaggcaatattaatctgctctgcgaacagcttgttggaaatttgctgataatccatttttttttgtcattccatatctcagtgtgagagagtaagagaatttggtaaaagttcttactttttagcttgaccttctgaggtctgaggagcactcaccttcccagtctcatcttccatccctctctaacacaccctcaagttccctgaggaaacaacattatatcctggttccagtatgtattatagttggtgccttaggaaaattactttctttttcagagacccctgccccacccttcctcatctgcttaggggagactgtaatactcatctttcagtgctgggtaagcctagcatgttccctagtatgcttataatcagagctcagttatgatcctttcacttttatgtctgtccttgacatgatgttctcttaacctttgcttgctctccaacattattttgtactaaataatggactaaaatgcccttcagcccatttccatccaaactgcaattcaggcatcacctctgccataagccatcctctttccaacaaccttcaacaccacccccgctccaccacccctgcctgccacacacacacagacatacacaggctggaaataagctcctcagaatgcttatctactttatatgcaactttataatacttcttggtgtgtctaaacagtagaaaatcaactaataattataatgcagcactgtgagagatatgagagaaaaaatactaatgactcagaagactacatttcattgctaagtggaaatatggcaggtccaaatctatacacagtatcatctttatttctatgtatgtggacacacaacacaaaatgtgtatatgtacgtatacacaaaaacagaactaagaatgtaaggatatatagtctccaaaatgttaacagtggtacccttgtttattttcttctctatcttaatttcatcttctttggtttcagtagacctcaggggtagagaagtgagttaatcatactgctttgcagtctttatacggcacaaggccccgtctggttttattgtagattttcttttttttttttacttcatcagcctcaattccatcctcctcacccagccatttggtttctttctgatgctctttatgtatgtccttaagtgtgcccaaattttccacattctttatgtcttctatattatagatatatatgatattattgtgtaatgcaacgtattttaatgtataaaatataacaaaatataggtaatgtttatatttatatctgaatgaaaccttttttcataaattagaaactggaattcatgtctctgctttttacctcttttccccgttgtctcccctcccctcaacactgcaatcacacacacatgcatgtgcacacacacacacgtgcacacatacacacacacacaaaaatgaagattttcttgaccagttgtacttccagttccaaaatctcaggattccttgttgcatatattggttgactccctcccttgagctctctgatatatggttttgtaagaagtttttaacatgatttttctcaagtaattgagctcctagtttttagcatagtacagcagagtttgaacagagaatgaccaatggcaatgcagacagccttattggactaaggatggcattttctggtgattcgtatgtttgccttatcttccccagtctaggctctattcaagcatatggcaaaagggacacaccatttgcagttagagcaatatttgtttccttgccctgccagctactagcaagctaagtgacttgagccttaatttcatcattatgccttaaagcacttcaatgaatcttaattgacacccagaaatacgcattttttaaccttttgaaatttgtcgataattattttatgccccagcatatgtaaacacttgataagagggtatattcttcagttgttggttgcagtattctataaatgtcaattagggcaatgtagtattgttgttcaaatgttttcttcccataccaatgttttgtctacttgttcttaaaaagtctgcatttgtgattgtgggtttgtccctttatgtctacttttctgttcatttttgcttcatatacttagaagctgtgcatacatttagaatgatatggaataattgaccctttattattatgaaacattattccttaactctgtaatattgtctggaaattaatttgtatcatgttaatataggcctacctgctttcttttgcttactgtatgattaatattttctcatcctttgctattaacctatctgtaactttgtaattaaagtacatctcttgtagacagcatataatttgtgttttttttatgcagtctgataatctctgtcttttagtgatagtatctggcctatttagatttattataattattaatataattgggattaagtctactctcgttatttgtttctaactattgcttctgtttttagtttctctattcttttcagctttgttaggattaagcatatattttaatatgaaattttaattcttctggctttttggctatatatatgtggtacgtatatttgtgtgtgtgcatgtgtgtatatatataaatatatataaatatatatgtaaatatataaatatatatgtaaatatatataaatatatgtgaatacatataaatatatgtaaatgcatatataaaaatatatatgtaaatacatatataaaaatatatatgtaaatatatatatataaatatatatgtaaatatatatataaaaatatatatgtaaatatatatatttggtatgtggtttctccagagattgcaatatttattcttcacttatcactgtatacgtaaaataaaataagagaatgttatagcagtaaaatttcacttaccttccacccatcttttgtgctattttgtcatatatttttcatctgtgtaataacaccacaatacaatgttgttatttttgcttgcaacagtgatctttcagatgcattaagagaagaaaaccataatcttttatattcacccagacatttaccatttctggtacacttcatcctttcctacagatctgagttttcatctggtaacattgcccttaagactgaagaactccttttagcatttcttataatgcaggtcaattagcaacacattttcttgtgtttttaatataaaattttgttttgaaaggattttttgctgtctataaagttcttggttgatcatttttttctatcagcactctaaaaaaattcatttcattattttttgacctccattgtttctgatgaatgttagccattattgacatttttgttccgctatatgtaatgtatctttttctctatcagctactaagattttctttttctttttctttttctcattggcagtcttattctgatgtgtctaaggtgattctttgtatatttatcctgttttgggtttgctgagttacttggatctgcagcaatagtttttaaccagggacaatgttggttctctaggaaacgtttggcaatgtttggaggtatttttggttgtctttgcttagagttcagataggagaggatattacttgaaattagttaatagaggctagggatgctgctaaaagttctacaatgtccacgacaggcccccacaacaaagaattatccaatttacaattcaatagtgctaagtgccgaggttgagacatttgcattttgagttgaatttttttccaccaaatattggaaataaaatagtttttctgctccattttcttcctgcgtcccttcttagactctgcttacatgatggtaaactgcttgcatgatgttgtctcacaggtcactgagactctgtttttaatttctgtcgacctgccttcaagttcataacattttcttttgcagtttcgaatctcctgttaagatcatttagcaaaattttcatttcagatattatactttttaattctgctattttcttcttctttttaaaaatattctttgctgttagctcattagactacctctttgtttaagcctttgaacatattaataagcttaaagttcttgtctactaattctaatatctgaagcatttcaggttctatttctatttactgctcttttattgttcaatttttactgctcctttatatctgtagttttattgtatgataaacattgtgatgatactttgttggaagtctggattaccattttctttgaaaacatgttaaattttattctggaatacagttaaattaccgacatatccttctggtcattaggcttgattttattctttgttaaaatgggtctattgtggttttcaacttagtcctaggaatgcagcctttattccaaggtgtagtccttattcctagtgtgatgtggcctttctgatacagaaacactgaatatccagctaaatgcctgagatgctcagcaagagctttccattttggctatgctagagctccaacatatgccagcatttataacctctggtatatagtgctggtttagttctcaaccctgcatcaggcagtctctgctgggccttgtgaagtcttactctctatatttacagcccagacctcagctaaggactcagggtgaatttccatgcagtcttttccctcctatccctccagcacccctaatccctatgtccacactgtgcctctccctattttcttttatattgtcccacatattcctgcttcttagtagtttttgtattttgatccctgccttcacagctcaggggaccactattctacttgggctctagatcattttatggtaataggaaagtgcttccaggcaaaagctggagcaattgtgaggctcatcttgtgtggtttctttctttcaaagatctcagtccttcttagactgttgtttaatgcctaaaaaacagatgttttatataacttatctagtttatcacaggagctcaagtccaataccattatcatggttggaagtggaaatcaggaatatgcattttaagtaaagaccccagataattctgaaactgatggttgtgggttcatattttagaactgctgatgtaaattatttaaagtagatataaagtattcaaagtagccccagctttctgaggaattgtcagaggatctctactctccaggaggtctaggtattttatattttgcaaaggataaaggacttttatctgaaatgtttcttggtgtgagatccctttgagtgtggtgtatgtgtatgcgtatatttgctacagtgctgagttgtactctgtgttttcaccatcttgtgtatagacaatgcacaatagaataccacaccatagcagaatcattgatcaaatatactgcaagaatgaatcatccatacatgtgtgtgtacacacacagttatatatattttttttttcttaagatggagtttcgctcttgttgcccaggctggagtgcagtggcgcgatctcggctcaatgcaacctctgccttcaggttcaagcaattctcctgcttcagcctcccaagtagctgggattacaggcgtccaccaccatgcccggctaattttttgtgtttttagtagagacggggtttcaccatgttggccaggctggtcttgaactcctgacttcaggtgatccacccgcctcagcttcccaaagtgctaggattacaggtgtgggccactgcacccggccttataaacattttcaatatgtagttttatatgtaaatttcatgtgtcaataaagctatttttttcaaaaagttaagtcatggcaatgatttggggaagtcattttattttcctggtgcatccatttgaggcatagggatacattgctaatattctattgagtattaaagtgttatgagtctgggttctttcctctcattgtccaaggggggcttccagctctctgactgttatgttcctgactgtgcctgatgaaatgaaaaaaacatgggtcttgtcttcacaccgacatttggatatatcctaactaagtaatctggtgaatgaactgacctctgactctcttttgatttaggctagaagtccaatgcactatccattgtgccacagagcctgcctgcttgcacgaattgacctctttgagacacagttcccttatctgaaaaataagagcaaaaatatatttcagttttaatgtgtgggatactgtatattcctagcatggtgcctaacatatagtaaggccactttggtatatgtgtagcacatgtgtgtgttgtatgtagcacatagcatatatacccttaccttgatcttgtaaacgacaaacaatattcatccacaaccactgctacttttctggagaacagtaatttgatctttctctcagaagttggcttgcaatggcagctccagaatttctgccttggagctaagagaagacaatcttggtggaaggggaggagcttgagaaaacgcttcttagagctgcatatgcataacaagcacactggttttctaaaattctacctgtatatggggggttgtttgggaagactgatagagttctctcagttgccctttggtgcctatattgtctcccctgtctctcttaaatggaactgaaatgtcgaacagaaaatttttgccttatttttttctctttgcagttttctttaagtagaccatcagtcctctgctatctctattctctatcatagacaaggtcagataacagcaaggacattttctctgttccagggtggtaattaagagggaaatgtcatagtccattttatgcaatttaagccctgatcttttgattagagaagggaggaaaaaaacaattgatggcccctcactttctggagttgaggttccatgtggtgcccagaaccctttctgtttcttcaggtttctattgaggattctgatctcattgaatagatttgattattattatttcataatgcagagcctttttatttggtccacatgttgaagagtaaagattccttatttagaccccttttccctggcacatcataagtacttactttgtctgttgaatcaaattaagcaatatccatgtaaagttttatatgagagtttattgagtagaatttggattggcacctgtagcctgatttctttgatccttgaaggaacaaaatatgttacatccatttgactggaattcccctagcaccaacagcctggttgtgaacactgtgccctatctttattatacgcagagttcattttggtttcaatgtagtcattactttgtatttctcattttttccactcttatcaatcttttttcatgttgtcgatccttttgggaaagaggagctagtattggtttcttaattagttcttctatctctttgaagataaacatttcccatcaaatattagccttctttacaataaagcgcatgttgtatttcaagaaatctccatcttttaggcaggctttctcagtgggtgcagtgttgcaatcagaaattctgaaaagcttgaggagacagtgaaacagtgaaagcatctagtcatatttgctacctacagttaagcaaagaccagatcactgccaaagttgatctgtttggtcttccttgccatctctgccatcttctctttgattattgcattccatagcagctcagtttcacatacttttattgagtgcttactgtgtgccatatattgcacttaggggactgtgaagaggcatgaaacatgcttcttgctgttgaagactcaatagcaagtaattgagttgaggggaggtagactcattcacaagtaattataatgcaagctgactgctctgagtcctaggatggaggaacagaatgaggtgggagaatggaggcatgagagacaaaaagtacctcttgaaagaggcaggatggggaagtgaataagagcagaggctttgggtccagccaaacctagcttcatttcattctgttgtgactgttactaaacttcaccaaaacctcagtttcctcagtgggactcccacctgccactgtgcttagtgcaagcatcccatttagttgtttatggaaactgcttagctgagtgtctagcctagagtacatgtttagtagatggcctttgtatgaggatgatgatagtgttaaagaattttaaaagtggaggggacttaggaaatcacttaattcattctcctatgtttatattcttggagactctgagtttgtgattctcccatagcttgggaaatagctgagccatcatagtctagtattcttcccattaacaacctgaaaagtgagtgtggacgtactcatgtgtgcacgtacagatttcatggtgtctgtaagtgatgacaaaagctttaataactggcacactagcataatatagaaatcaatatatatcaatgtaaaatataacccccttttattctgtaaataaatacacacaagcacatgtatattatcactgtttatagcacaaattatcactctaatttccaattttttaattgatttttggacattctgaagagtattcttgttactagctaaatgatctccatttccgggccatggtttgacatagggaatgccagccaaaccttccagcaacttccccattaaattgattattctggttgggcgtagtggctgacacatgtaatcccagcactttgggaggtcaaggcaggcagatcacttgagctcaggagtttgagaacatggcgaaaccccgttgctgcagaaaatacaaaaattagccaggcatgggtgcaaccctgtagtcccagctactcaggaggtggagttgggaggatcgcttgagcctgggaggcggaggttgcagtgagccaagattgggccactgcactgcacagcctgggcaagagagccacaccctgtctcaaaaaaaaaaaaaaaaaaaaaagaaaaagattatcctaagggccctggcactttattgcagtacaaagagagttgggtgtgctattgccttgtaagagctgtgatggtcttggatgcctatgcttcctatgtggcctgaaacgagaaagcctgactcattggcattacctgctctgtggcctctgcctgccagtgcttagctcccctggagccttccatggatgctacacatgcccctgcttctgctctcttggtctgttgagcagctgtgtccagggccacagctgtagcttataccacgtgccacctagtacataagtattgtaatatatcaaaaaccagtactactgaatctgagtgaacctgaatattagtcctgcaaatagctcacaataagtcctcctaccaggcaccaggtcacgtcaagatgagaagcagaaacttcagagtgataaagaggttcacttctgttaaacatttgttcttctgaactatcaaaagtgaagagtttccatgggccatagcttggatacaccaataggagattcttaccctagggaggcttgctagacacatctccagtctggctttgttaaccctgaaatggaacagcatggctttttttttttttttttttttttctggccaaggctgcgtgagtttgctagaggcagcatttttttgtggctttatcttctatgtgccattctattaatatttctattctacagataaggaaatcaagacttctctagactatatatccagctaatagcagaggtaggatccagatcagttctggctgaactgaagctgacataaagcctgtattttaatacaggttgccttctgtaatgcctaacctcttgtttggcataggggttattgatttgttattttgctaaatgttatctttttttctctgaaattttaatttctagttggattcccagccatttgtgggaggcattccttggaatcatgtactatgagtgctgaatttctaagaattaaaataaaaattctgacaggcatggtggctcataactgtaattccagcactttgggaggctaaggccggccaatcacctgaggttaggagttcgagaccagcctgggaaacatggtgaaaccctgtctctacaaaaaattaactgggtgtggtggtgcatgcctgtaatcccagctactcgggaggctgaggtgggagactcacttgagcccaggaggtggaggttgcagtgagccgagactgcaccactgcactgcagcctagataacagaatgatactctgtctcaaaaataaataaataaataaataaataaaataaaataaaataaatttaaaaaaataaaaatttctggtcattttagaagatctcattacataaaaatcacaatgtcatgcgtgttattatttgatcctgttgatgacatgaggcatgtagaaaagtttttgttcttaattagttccagtttatagggtggggagttggtggggggaaggaggcctagaggagtaaaatgacatactcaaggtcacacagcttttaagcagaaaaaccaactttcaagtctgagacctctcttctcaaagtctgttacatttcctcaaagcttccctggagtgagatgaatggggaatgagacgtaagcagcctttggagccaaagcagtggctttttccatggtatatctacttgttatgcccatacgatccatttctctaactgctgggagccaagatctgaaaaatctgttacaaagaaggatgatgaagccctttgtgataatgacacgagttccttccttgccctttgccaagcactgtgaaggaatggcttttccctagagtggggcatctctacagagtcactttagtttcagggatttctatcccacagttgtcaattttatagaagccaggacaagacatttttaacattgtgactcttaaccactgagaaaaatgcccactggtgaatgggaacatgaatatgacatgattctaatgccaagttcactttatcagtcgtctctccaaaaggctgatcctgaacactatgggatactaactcactttactagacctggatgatgaaaacattctggaaagaggaaaagtgatgttctgtggaagtgtttttgtggagtcccagaggatccactgaagaaggctgatgtcccaagaactgcagttggtgccaagtgttggttgaattcttgagagcaagaactgcagttggtgccaagttgctgcccatctcctccctgtccccagcatattagatcatcttgagtattgatgctggagctgagacagttaccactgtgatgaagctgggtctgaagtcttagaataagtcaaatgtagaaggatgttccttcctggcaagcccctagcctgcttggagtgaggggggcacacaggctcttggagggctgttggcagcatttgcctgcctctcccaggccagctgagaaacttgtgtggctgtgaactgtgatgaatcacgcaagaggaaggaggtctctacagctgttgaggaaggacatatcaaacttgaatagcatagcacttggctctttattttatgtaacatatttttaattgtaaaactaatgaatgtggccgggcacggtggctcatgcctgtaatcccagcacattgggaggccgaggctggcggatcactttaggtcaggacttcaagaccagcctcaccaacatggcgaaaccccatctctactaaaaatacaaaaattagctgggcatggtggcgggcacctgtaatcccagcttatcgggaggccgacgcaggtgaatcacttgaacctgggaggcagaggttgcagtgagctgagatcgcaccactatactctggcctgggcgatagagcgagactcagtctcaaaaaaaaaaaaaaaaaaaaacaaaacctaatgaatgtaacttgcagaaaatttagaaaatataatcataaaaacaaacaaaaatcactcatcattttcccagatataattaaatataattactataactgttttgaaaatgtagtggataaaagcctggactctagaatagcctgcatgggtacaaatcctggcttactaactgtaggacctggggtgaatcactgatatgtctttgcttcagtttccttgtgtataagatgaagatagcaatggtattgccttcatagggtatttgtgaagattaaatgtgttactacatataaagaatttagatcagtggcctagtatgtggtaggcattcagtaggtttcagttgttattattttatgtttattatatcctctgaattgtttctctaaactgagatagttttcttttacaaaagtaagattacacagtggattatgtgttgtagcctgcttattttacatttagcctttgccatgcccttctgtacttttctgcaaaatgattttagtagctaaccatatggcgttattagagatatttaacaattcccttactattgaaaaaaatacatcatttatagcctcttgccatggtaaacactatcttgatgaacgtctctttttggtaagtttttgcataccatccttcttttgatgacagtattttatgggggagcatttcttcttagaggaccagatggaattatccacagcccagggtgccataggcatgtactgaataagcatatgaggggatgatcactatgcattatggacactccttctcctttgataccacttctcacagtgttttgtccacggctaagaaatcaataaaatgtttatgaaaagcagccacacttttttatattttcagttacattaaggcagttaagactagccctagcatttgtgtttatcttctttatataatttctaaatgactattgaatcatctcaaatctcttttggaatgaagctcgatacaaataaatgatcaaacagccaactagcaatctagtgggagacagaaattctctcccaggaaacacaaattttatgtcactcttgacagcaaggactggtcaggttcctacaacttggaaggaataggatactgcgtctagtttcccaaacattaggaatcccaaggaaaacttatttcttacacccttaaagtgactcagaggtaaaagtgcaattctctgatgtttgtccttggtgggcttagattttcacaccacagacatcattgaaacaagaatctacttggagccttagaggcagtcctggacctttctctttggatggcactcacatgctctgtcaactctgatgtcctcaccttcactctcttacaccctcaaatccctgaggacccttagtaagcagagtgttctttccactgggtgccattttagccaaagtatttagaaaggtgttggaggtagcaagctctgcattcctaagaacacaagtggtgttaaccatctgatgcaagggttggaaaactttttctgtaaagggccagagagtaaatgctttagactttgtgggccgtaagatctgtggcactactattttaactctgcattgtagcatgaaagcaaccataggcaagatgtaaacacataagggtactttacttctggacattgaaatttgaccctcataccagtttcatgttatgaaatatcattcttctttctacttttttcaatcatttaaaaatgtaaaagccattgttatttcacagactgtacaaaaacaggccgtggactggatctggcccatgggatccagtttgttaccccttgatctaccgtggtcattgtttgtcttctgcatttctttctcattgcaccattttcttctttgttgtgccatattttgaaacctctctgccctttctcttaactagctgaggctaaaatatttgcagaatctgcacttttggcacttatgtggctcatcagggaaagccagaatatctacctaaaagaaccagtagagcaacatcaaataatgcccctcttcttttttgtgtggccttgccagttcaacgtataatttgaatatatgaaggttacagatggactctggcaagttgttctgatttctgcagcattccaaagctctaatgagcagagcatgcagcctgagggatggtgagagtctgatttttagataatcaaggatatttatatcttttaataggctggtgccttgtagttctattccagcataaaactgagagttgaagagacatctaatcaatttgatgtcctctctttaacagttatatatcaaaggggtgttcaggctgaacacatgaaaatgttacagggatggaaatgggagaattataaacattttatgctgctctatcctcactatatttaaaacaaaaacatgatacagatttttacatggtggggtgtgtttacagggaaataatgtgctctatttcatatgaaacaggacacaagagagcattctcagatttgtaacactagccgtagtctgtggaggtgcccattagacctgttcctggccttttattcagggctgtgaagcagtaggggcgacagaggctcggctgcctgcgtaatgagattgacttggtttgcctggcatgcagtgatttatgagggtgcttattgtagggatatctgccgctgagagcagccagatgaaaggtgtgtgggtgagaggtggaggagagcagggaataggagagaggcagttgtgtataggcaggtaaggctcatcttgattatagttgttggaatcctgagctgagtgaagatgtagaatagtgtgaaatggtagattagcaaggctttggaattgcacagatatgggtttgaattgctgacccttccactcgttaactggactctttggtgagttactttccttctttgagcttccattgcttcatctgtaaactggggataataaccacttccactctcccgctatatgaaactgtactatcataaaggtctgagcacagttcctgttgcattggagagctcagttagtggtagagatgattaatgtttgtccatatgtccattcattgtttgtttaccagtattcaatgtgctttgcaatttctaacagagcctcattttctaatagatgtctaatggtgacttagacatctgttaggtatcaatagctcttaagatcaggatggaagaacatgacagtcaacatgtatttatagatatatgtatgaacatctaagtggcatgtaggagtgtactggtacctgaaatatgattgaaagaacagccacctggccagtaagcacagtaaaagatacttcacctcactagtaatcagggaaattaccaaaataggaccaaagtgagatacttatttatacttgacaaagtggtaaaaatgtaaaagtctgacaatactaagtgttaaggagaatatagagtgaaggaacacatatgtactagttgtaggaatttaaactgctgtgactgctttggagaatggtttgtcaatatctagatatatgaagtgtacataccttatttactggcaaattctgcttgtaggtataatctagagagagtcttatgtatgttatcaaagtcatgtgttcctcactgtgttgcttattataacaaatagcctacgtgtccatcagtggggtaattgatacacacattaattgagctaaagctgcatttggtaccagcataggtgaattttaaacaaaagtaagtgaaaaaaataaagttgcaaaattatgcaaatagaaaaccatttatgtacagcttgaaatcttggaaaataatattaatacattttttgtggatacaaacatatggaatacaagtttgaagaaattaattggaatgacaaatataaaattcaggctgatattaggagaagaaagtgggatgtgattggaagggttgcctggggctcaatctcaactctgctagtaaataaatattcactagcttgtatgcccttagacaagtttcttaacgtctgtgcctcagttttctgatctataacataggaataataatattatctatttcattgggatgctatgaggattaaatgactgaatatagataaaatgcttagaaaaatacctaccagatagtaagtgttatatataagttagcaattatagtgcctattacgtgaatatttttattattctttattttgaaaatcttatatattgcaagttttgaaaaagaatagatgccattcttgtcttttgtcatcatatagttggaaagtgaacaaagattaaaaataccatcaatacaggaatttcaggatgtggcataatagagtttagctacgttctcttgacccctagatttattaggtaccatgccaacagctttatatgcatttatttaatctttccctatggagtaggcacaatttttatccctattttacagatgggaagaaagagatttagaaagactgacttccagggtcacacagctaggggtagcaaagctgggcaggaacccaggtgagaatgactcacgctcttgactgctaggccttaaagccctacctggccactgttcacattaaccacctcctctacacagattcctgcttccttcctgtatcagcctgcataggttaggttgtgctttggttatgaacattcccaaaagatcagcggcttctattaacaaacaggtgtttcttactgtattagtctgttttcacgctgctttaaagaactacctgagactcagcaatttataaagaaaagaagtttaattgattcacagttccacatggctgtagaggcctcaggaaacttacaaccatgacagagggtgaaggggaagcaagtcacatcttacatgatggcaggacagagaaagagagcaaggacggaagtgccacattttaaaaccttcagatctctcactgtcatgagaacagcatggggaaaatccacctccatgatccaatcacttcccaccaggttcctcccctgacccgtggagattacaacttgagacgagatttgagtggggacatagaaccaaaccatattacttactcatgccaaatattcatcaaaggtcacctgggtcatcaaaggtcatatgccacatagctcctttctctgggacccagaagtcatggacagagcagccacagtctccaaccttgctgattgctatggcaaagggagagagaaatacagacagagagagagagagacagagaaagagagaaagagagagagaaaaactatggagaatatcacattgacagttaaatgtaccctggaagtgatgcacaacatacactgtgatacacagcacttcccctcacacacataggctggagcagtggttttcaaccaggggtgattttgcctccactaggggatatttgccaatctctggagacattttttattgtcacaactcagaggtggagtgggggttggggcaggtgctactggcatctagtgaatagaggccaggaatgctactcaacaccttgcagtgcacagggacaaccccctcaaaacacgcacaataaagaagtatttagcctaaaatgtcaatagtgctgagattgagaagccctggactggagctaagcacaaggggccaaaaagcgcaattttaagaagctataaagggaagagaacctgaaatatttgacagatagcactaatagctgccatgcatcctaaggcctaaaagctgtactaaagccccttcagaaggtgtttttcatgatagaagtgaaccagtgctttaagggatagccatggaatggggcttctagtatagtcagcttcatcagagggccgaggagtgccctggactcactgaagttgactactgctcttcctcagcagtctctctggagcagcactgtccaaatgtagtacaataaaggccacatacgtagcttaaaaattttcagtatccacaccaaacaggtaaaaaggagcaggtgaaattgattttacagctataatttctttaattcaatatatttaaattattatttcaacatgtaatcagtataaaaatattgagatactttacattcttttttttttgcaccaagcctttggaatgtgttgtgtgttttatatttactgcacatttcagttgagactagccatatttcaggcgctcaattgttacacatggctagtagcggcaatactggaggtttctgttcctgggactcagtgagggactgacctgggtctcccctgaggaccagtagcaatgctataactcagagtctataagttctgagagtgggacacaatttccaggaatatctgtcccagactcttaaagacagtctgtgtatgttttaagaatgaagagggattggttttccgtggattctctgccatcaccatttttgtttgtttgtttttttttttttttggcaggtgcctcatctccagacatggagcccagctatgggggaggtctctttgacatggtaaaaggaggtgcagggaggctctttagtaacctaaaggacaacttgaaagacaccctcaaagacacatcttctagagtgatacaatctgtgaccaggtacgcacattcttcccagttaatttagtggatccccatgctctcaaaggatctggttacctgctgactgcttgtctggctcaaagagtgtcaattttgggatataattttatgggatctgatgaactgagaaatgtcattgaagacataaagttaagtcctttagaagctataagcacgggctgggaggactcagttcattgccacattagagtataatggttgccctccctgtctttagaatcaaacatcttgggttctaatgcaatatctgcccttgttaactaagagccctcaggcaagttaattaacctctcagagctttttttttataccctgacaggatttgtgtctttgggttgtttagggattaaatgagattaaaatatacatgcaatctgaataagcattacctacggattgtaatcaaatcagacctttgtttttgtttcctactagccctttaacatttattcagtgagagaagtttcctactcttccactgtatgaaaattcttataagcaggtcataggagttattttttattgtttagtattagaaaattctagggtcactttgagttacaatatgcagttcttaatcagaaattcaaacgtcaagtacattatattaatcaaaattttaatctttgttcaaagataaaactattcttacctctgattctcaaccagggcctggtaggcagaaaaatggtgtcatttattttttctcaaccacttcttcccctaccccttagccacttacaattatggaagatatttccaggtaggcaaagaagctagaacaattggtgttgataaataagcagagttttctattctgagattgattcagatcatgaagtggcatctacaagggcattagaatgcaccagttggagtggcatatttatacccctgaggtcacgggctttcttttctcagtgatccttccttgttggagagaagggctggaggggagtcgaaacatgccccctggacagcggtgtcccagttcatatgcgcaagtgattgagagagagaaatcttggcatatttggatcattttaatgagtgcccatttttgtcttgcttttagctacacaaagggagatttagacttcacttatgttacctccagaattattggtaagtttctcatgtttattaacagtcctttggctcagtttcccgttgctgcccatcgttatagcagacgtaaacatttaacctgttttctttctgtgtgatctctctcctagtgatgtcctttcctctggacaatgttgacataggattcaggaatcaggttgatgacattcgaagctttttggattccagacatcttgaccactacacagtatacaatctgtcacctaagtcttatcgaactgccaagtttcacagccgggtaaggatttttagccctgagatcatactgttgaagacgtgatggtgcttttcctcctcagagatacccttaaagcacgtgcccttaggcatctgaagctgaaaaactatacactctggacacttctgttcacaaaatatttattaggctgctatgagatatcctaaagattttccttgggtgaggatacttacaggaaagtgtatctgtcaatgaaataccatcgaagttggggtctcaagtctgttggtgcctggttgttccatggcacagtgttcatgaggcttaagttggagattgaactgctgctagggcagttggctgccttcatgctgttacactaattatgccgttgacccttctttattgctacttggtatcaagataaggcagtgtggatagaccggtactgacaagtattaatgggaacgtgtttccattaatatattttaagaagttttttgaactagagtgagaaatattcctagtttcaccttggcttaggtttgaatctgatatcgagcctgatatttctggccactgaattctgacttactcactaaaaaaaggcatttttttcccctctcaagaacatctctaaatatttttgacttagccttcagatatgattggttctgcaacttcatttgggtctattaataaatagaatggactttctatgcatggatcctttaaaagtgaaacttgatgtcaaatgtgtaaaatgatagctggttgacaatgctgtgtatctaggatcttagctttgatgctggaacacacttcgttccaaattccagttaccattgataatctctgggcctcagtttccagatctgtaacacacacaagaaaattggtgtacatgctttatatggctccttcctgccctaatattcaataagctatgggagagttttaaggacctctttttcagcgtattctgagaacagtctcaaattttggtgtgcatcagaatcacttggagggcttgttaaacacagacttctgattcagaaggacaagggaggcataagaatctgcatttctaacagcttcctgggggctgctcctgatgttgctgcggggaccactctttgataaagcactgataacgccattctgaagtggtttgatctaaattgccattctataatgaagattttaaatgcatctctttaaaatcttctgtaataaaataaccttccaactcttattccatctattagctaattcagaacaagtgaattaacatcaaacaaaaatgtggatagatattttgttcttaatgtaaggcaaatcttttgaattatttttcttgactggaggctaagtcagtgccattattttcataatttaaggactgtggaacatcctacacaatatttcatagaaattttatttgaccttgaaagatctgtgataatctggagcattttccctctgaaagtaaataaagatatgatatcattatagaagcatttatacatataaagatgtctctttgtataatgtttataaaaggcaatctctataaagatgtttttaatgaaaggcatctatcagtgtaactaaagattttgtgactggacttaagggtttaccaaaggaatcagagattacatattaaacacctaccctgggctgctcttacttgccctagaagaggagggagcattttttttttttttttttggatacctagaacaacagttcctgacatagataatcaatgtttttaaaaagcatgaatgtgctgcacccattaactcgtcatttagcattaggtatatctcctaatgctatccctccccaaaaataaaaaataaaaataaaaaagcatgaatgtggaaagaattgttaaacactatagatataaaataaatatttggtttttgttctcaagacacctaagcctagttggcgagagaacccaggacgttctaaagataagtacaaataatatttataatacctgccaagggagattagtaaagggagacaccagtgacagctggaccttagagcaggagaaaggcttatataggtcagaggagtggagtcatttcttgcctatacaaatcataaaatatcttgtgaggctcttgatgatctagcctctatctgctcctctaacttcatcttttaccattcttcattgcccaaaaatcatatgctccaactagggataggcatgtgctcatgtgcacacagacacacacaatcttcttgcatgagctactccttctcccttaaaagctacccatgtcacacacccttcgtctccttccttccttccttcttcccttctctttcctttctccttccgttttccttcccttctccttcccttctccttccttccttccttctttcctcttcttcctcctcttcttcttcttcttcttctcctccttctccttcttctccttctcctcctcctcattcttcttctcccttcctccttccttcctctctcccttcctcccttcctcctcctcttcctcctccttcttcttcctcttcttcttcttcttcttccccctcccctcccctcccttctcttcccctccccctccccttcccttcccttcccttccaaaagagcctcactcagttgcccaggctggagtacagtggcatgatcttggctcactgcaaccttcgcctcctgggttctgattcttgtacctcagtcacccaagtagctgggattacagatgtgtgccactatgcccagctaatttttgtatatttagtagagacgattttgccatcttggccaggctggtcttgaactcctggccttaagtgatccacctgcctcagcctcccaaagtgctgggattataggtgtgagccaccacccccagcccatcttcttctttatttgcctaattttgctaaggagaagatttccacatgccacgaggcttttccaattctctctcctaaaacacaggattgcactacatctttagctcttccagatagtcctagaatttggcagaatgcaagtggatcctctgacctgtctcctttacccttagttgcatcttagggaggcagtcccaaagccgtagtatttccatcttacctttgtttttgatttgcctacatctcttttcaaactcctagacctttctttccccagcactaacactgtgaatggatttgcatctcattgttgcatgacttagaaaagttttctttgtttttacctttcagttcatgaggactagaaccatttcttactccttccggttctgtggagtgctacgtctgaaattaaaccttattttaataaatgttgatggtagagtctaccataaatactaaacatggaactggttttatttgtagattcataagggtgtataaggtcttaggaattttttatttataaactcgtgggagtctggatatgcccacatcatatacctctgtgccttgaaacctgaattcagtcattttacatgatgattatgtgattgtttgtatatgttcaaacctgcatttgaggatgtaggtagtgatgttggcaaagacaggctgtttccaggaagattttactttgctgagggttgtcattctgtatttcgattcacttttatgcttagaagccacattggttgacaggaattgtatgaaatgatcaatactgttttcctgatttttctattatatatttgcatatgtcacagaatgttaaaataggactttgtttagtctcagtttagcagaggctacaactcaaaacaatgcatagcacatagcccagcattcaaaagcgaagtactggaatacctattcaggactgcaaaggatgtatgaaacctcaggtgtttttatttttttttaatgttttttgactctttatagccaatatccaccttgaggaaataagagtactgatgctgacaatgaagtcctggagaccaacaagatgcatcagttaaaccagatgttcataatgactcctctgtgtatgtagatctattgctaggcttcagagagcttaaccatctgtttccgctcctttaaaaaaattattgtggtaaaatatacataacataaacttattgtaaccatttgtagcataaaatttcagtggcattaattatattcccaatgttgcataaccaacaccgctatctatacttaaacctttctcatcatccccaacataaacactgttcccatccactccatgcatatgtgtgtgtatgcgtgtatacactggtttggtttctgcatagaaggtttatagctgtgccccagaatatcaggaacctttacacatttcttggcattactgttggcaataaatggaaagctggatgaatgtacaccaagtctaacctgactccagagttcttaagttctgattaatgctattctagggccactttgtctctccttcttccactgtttacccaggaaggacagtatggtgacagagtccttctagcagcaaagaaatctgcagcccagctggttgttttaggctctaccctcttaactatttctaaatgacataatcttctaggatttctttccctttgggaacaatttgatttttggaaaatgtattatcaacttgggtgtcttaaaggactcatgattgaaggtcaatgtttttacccctttttcttcctgagcacaccaaagaggttgctacagctcccagttgtttctgcattggtgggaggttggtgggagattggctggagtgggggaagtttatagctcatatttcatctctcactctgctaccatgcctcagtgtcaggacaagaaataactggagtgaaaaaaacaatccctggcctgggggccagaggaccagagactcccacattctagttatgaagccttccatgaattgaatgtcttaaccctggtaaaatacagccatcacttgaagctgtaaccactctacaaatgcaaggtggagttattgttatcagtcatcagacaatgtagtataatggagagtgcacaaattttatttttttaaactgagatgaggccatatagtgtatacaaactttagactttaaaaattaccctaggttcacatctcagctgttcttcttcctgggcaagtcacttttacctctccttggactcgtttttctcctgtgtaaaatggatatgccaataagagagtgcctatctcacaagcactcttagaattttttttataggtttgttgtaaggaataaatttgatagcagtgtcttgcttagagtcatcatgcagtaagtagtagctatgattaacattggtaataataaaatgctacaataagtgattgactgaattatccccatcctccaaaaatggtgtgtgattcataaaacactagatgtagcaattaagtcatactctctgtagaagcgttcattcctatgcttagtgaatggctgcttctgcccatcctgtcttgggcaagggatgatggagagatgaaaattgaatggcatccagctctagcgatgatttggcctctttttcccactgggtggtatcatggcagtgctgtaatctgtatggtgtcctctgatgctaagcaagcccaggagatgttcaaggtgttcaggaaaactggcgacagcattgcgaagtgtcagctactgcatgaagctgtgaaccccagagagctacaaaaatagcttgcagtgattgaattccttttttattttgttggttttgtttatgccttagtgttttccccttttagacagagcacatgcttttaaaaaattctaattgtatgtttacttaatggtgtataattatatatcaagtaaatatataattatggagtactttaaattaatattatttacttgattgagttaatgattctggagctattagcctattgtgctaagaataatttagccaacttttagctgagactcattacagatattgacatttggggtgtgtgtgtgtgtgtgtgtgtgtgtgtgtgtgtgtgtcatagccagtttttaaaaccttcaaaaatattgctggggaaataaattttctatactttcattctgttacagtctaaaaaaaacccaataaaatgggttcacctgttccctcctcaagatatggtacatgtggacaaatcttattataaaaatagattgccaaatggggttcattcctttattctttcactcattcattcactcagcaaatacctgctgagcacctaccatatgagcaacacatgcacagtggacactggggttacaaaaatgagtaagttatggtctctcttctcatggagcttggtgtctacaaggggagacaggtataagcagtttattcagtacagcttgaccacaagctagcatttactgtgtttatgttgtgctacttaattctgacaacaatcttgtaatgctcatttatactttacacactagataattgaggcctggagaggttagtaaattgcctaaggttaatcaagtagtaagtggtaaatccagagtgaaaatccagcctgtggatttaaccatgttgttctactgaaaaaagctgtaatagatgaaaataaactggggcatgagtataaagatgactaagcgtttctgtctgtgagtattagagaaacagtcagagccaagagaacacttgaacatttttttcttttttaaaaatttgagttaaaatatgcatatataatgtaccatttttaccattttaagtgtacagtttaattacatttgtattattttttcctccttcaaaccctctcccactcctcttcctggcctctggtaactactaatctactctttatcttcatgagatccacatttttagtttctgcatatgagtaaaaaacatgcaatatttatctttctatgcttgggttatttcagttataatggcctccagttccatccatgttgctgcaaatgacaggatttcattcttttttatgtgaataatatttcattgtatatgtataccacattttatttattcattcatccattggtaggcacttaggttgattccatattttggctattgtgaatagtgctgcaataaacatgggagtgcagctttatattcgatatattgatttcctttcttttggatatatacccagtagtggaattgctgggtcatatggaaccttcatactgtcctctatggtgattgtactaatttaccttcccacctacattgtataagagttcccttttctcacattttcaccagcatctggtattacctgcctttttgatacaaactattttaactgaagtgagatgacactatattgtgattttgatttgcatttctctgattagtgatgttggacattttttcatataactgtatgccatttctatgtcttctttggaagatctgttaattctcttcaactcttttgcccagtttttaatttgttttttttttttattgttgagttgtttgagctccttatatattctggttattaatttcttgtcaaatgaatagttcacaagtatttcctgccattcagtgggttgtctcttcacttcgttgattgtttgctttgctttgcagaagctgtttagcttcatatagtcccaattgtgtatttttgctttggttgtgtgtgcttttgaggtcttccacaagaaatttttgtccagatcaatgtcctggaacatttctctaatgttttcttctagtcattttatatttttgggttttggattcaagtttttaatcaattttatttgatttttatatatagttagagatataggtctattttcatttttctgcatatagttacccacttttcccagcaccatctatggaaaagactgtcctctcccactgtaagttcttagaatctttgtcaaagatgaattggtggtaaatgcgtggacttatatctgggttctctattttgttccattagtccatgtgcctgtttttatgccagtaccatgctgttttggttacggtagctttgtaaaaaactttgaagtcagatgatgtgatgcctctaactttgttctttttgctcagggtggctttggctatttggagtcttttgtggttccacatacattttaggggtttttttttatttctgtgaagaatgtcattggcattttgatagagattgcattgaatctgtacattgctttgggtagtattgccattttaacaatattatttcttctaatccatgagcatggaatacctttcctttttttgtgtcctcttctatttctttcatcagagttttacagttcttcttgtgtagatctttcacttctttggttagattgattcccaggtattttatattttttgtagctattggaaatggcattggttccttgatttctttttcagattgttggctgttagtaaatatgaatgctgttgatttatgcatgttggttttgtattctgcaactttactgaattcgtttgtcagttctaacagtttttttggtggagtgtttaggtttttctagccataagatcatgttgagttcgaacaagggtaatttgacttcttcctttccaatttagatgtcctttatttctttttttgcctaattgctctggccaggacttccagtattatgttgaataatagtggcgaaagtgggtatcgttgttgtgttccattctttagaggaaaggccttcaattttcctccattcagtacgatgttagccatggatttgtcatagatggccattattattttgaggtatgttccttctgtatctattttctgaggatttttttttttttgagacggagttttgctgtcacccaggctggagtgcagtgatcttgactcactgcaacctccgcctcctggattcaagcagttctcctgcctcagcctcccaagtagctgggattacaggcacctaccactatgcccggttaatttttgtatttttggtagagacggggtttcaccatgttggccatggctggtctcaaactcatgacctcaagtcatctgcctgtctcagcctcccaaagtgctgggattataggcgtgagctgccgagcctggcctcatgaggatttttatcataaagggatgttgaattttatcacatactttttcagcatctattgaaataatcacgtattttttgttcttgattctattcatgtggtatataacatttattgatttgcatatattgagccatccttgtaccaatgaagtaaaacttttttttttttttttggagacggagtctcgctctgtcacccaggctggagtgcagttgtgcgatctcggctcactgcaagctccgcctcatgggttcacgccattcttctgcgtcagcctcccgagtaactcggactacaggcacctgccaccacgcccggctaatttttttgtatttttagtagagacgggatttcactgtgttagccaggatggtctcgatctcctgacctcgtgatccgcctgcctcagcctcctgaagtgctgggattacaggcgtgagccaccatgcctggccatgaagtgaatctttgttgataatggtgaatgatctatttaatgtgttgttgcatttgttttgcaagtatttggttgaggatttttgtatctgtgttcttcagtgacactggcttgtagttttccttctttgttgtatccttctctagttttagtatcaggtaatgctggctttgtagaatgagttcgaaagtatttcctcttcttccatttttaaaaaatagtttgagtaggattaatattcattcttttttaaatatttggtagaatacagcagtgaatccgtcaggacctgggcctttctttgataggagaatttttatacagcctcaatctcattacttgttactggtttgttgaggttttctatttcttcatggttcaatcttggtaggttgtatgtgtccaggcatttatccatttcttctaagttttctgatttgtttggtatataattgttcatagtagccgtctcttatgagtctttgtatttctgaggtctcagttgttaggtctcctttttcattcctggctttatttatttgggtcttctctctctttttcttagcttacctagaggtttattgattttgtatattgtttcaaaaaaaacaaccttttattttgtcgaaatttttttctttttagtttcaattttcttaatttttgctctggtctttattatttctttccttctagtaattttggctttagtttgttcttgcttttccagttccttgaggtgtattgttaggttgttaatttgaagtctttctactttttcgatataggtgtttattgctataaactttcctcttagtacttcttttgctgtatcccatatgtttttgtatatttccattttaatttgtttcaagaaatttttaaatttccttcctaatttcttcattgactcattggttgtttaatttccatgtgtttatgtattttccaagtttccttttgttatttagttgtaaagttttattccattgtggtcagagaagatgcttggtatgatttctattttatttatttatttatttattttatttatttatttttttgagacgaagtcttgcactgttgcctgggctagagtgcaatggcgtgatctcagttcactgcaacctccacctcccaggttcaagtgattctcctgcctcagcctcctgagtagctgggattactggcgcctggcaccatgcccagctaattttttgtgtttttagtagagtttcactgtgttggccaggctggtcttgaactcctgacctcgtgatctgcctgcctaggcctcccaaagtgttgggattacaggcgtgagccaccgcacctggccaatttctgtgtttttgaatttgtacagactcgttttgtggactatggtctattctagaaaatgttccatgtgctaatgaaaagaatataaattctgcagcagttgggtaaaatattcagtaaatgtcaataaggcctattagatcttgaacctgggttttaaaagatgaattggagtttaccaagagaagaaaatacattgcagacagaaaggagcttgtacaaatgtacattttatgattcctctgacagcaaaatgtatcttcccagttattctgtatttttagtcagtaagtcatttccgttccttgaaaacaaacacgtcaatggggaatatatatgtgggtaaagactagaccagaaacagtcctgaatcatgttgggtaaaaggggcaaggcatcataaagtttaaattgacagaggccaatgctagatcaccctggactgtttgggagctatgccaaacatttcaaatactttgtttaataaaccatacttgtctctcctaaaggtatatgaaagtgggtaacctggaaggtctcctgacatttgccccacagtcatcttgtagaaaaaagttacaaattaacaaaaaagaatgggctttcttggcagccccagacagagaaactcaatgtgtttgcttttagacgtcagctctaccaagagcacagataatttcctagtcgtattttgattatttattatctgattaccagaaaagggctaatcaaacaaattcctcctgcctccctttcccatggtcaaatagaaggaattcgagacatttgggattgcagagcacattctgacatcatctgtatgaagcctcttctttctgcagaattccgtatctcaggaaatagcacttcttgtatccttctatccagccattcaagctggaaacctggagttcaggcttgactctttcctctccctcccctgacacactcttcagtacacccctccacatgcacacactgccaccatgtatcacctgtcttatgtccaggtgtcccaccacctctctatctcctgagtccctcaagtgtgtttgtaccccactgctactcagctagccttagccactatcatcccttattgacactcctcaccaacctcctgactggtcttcctacctttaggctcttgttatccatttctgttctccatactggagcctgaaagatctttggaaatgtagatctgagagtcattctccttcttaaatattctcccagctccttaacaagactgtatgatctggcccttcagtctacactctcaccatgaaggacttcatttttttcaaacatggccagtcctgactgcagggctttgcactggcagttacccgataaaatgataataattgccaacatttattatcactctgggtgtgtcagatactgagctaagctcttgaagtacatgttcatgtagtatcctgtgagttatgtaagaggtactgttcaccacattttatgaagaaaggcttaaagaggttatgaagtttgtccaactctaagcttctccttgttgtttcttagctagattagtaaatatgtaatcaactggggatcatgccttaacagtattttgaggcaagtgataatgtcagccagtgtgctgttgtaacatgatttatattcagaagatctgggctgcagtgctgacgctgagcagcagtgtgactctggataacctctgagagtcagttttctcatctgcaaaatggggtttatattaatacctgtcttagatgattgttgcatggatcagagccaagcaatattcctataacttagttgatgatccataatgtgtgaaaaaaatatgcatgttaaatgaatgaaaatgccaagggtttcccctgtaagttgtgtcctttgattaaaagagaaaaaaaatagatccatgcacaagcctgcctttggctcactctatagcacttttcatgttatcacgagagctgggataaattagagatggtgcaggacttataaccctataattaaacatttggggggaggtcaaaacattttatgcttaatagaaatgaaattctatgtaacctcacagaatagaaaaaaatccaaggatgtatttgaaatggtctagtttaatttaaaatgtgcttcaaaatgtgttttcatacctttactgaatgagaattctttaatttaaaaaattgctgtgttaaacaccctcttcttcatgcatttggaccctgttcccactattcctatctatattaagagaggatgtggtatcacttccagaagatgttggttggtgtgataacctgcttatgaagaggaagttgctggaggaattaatttccttttgctgtgctcccttaggtctcagaatgcagttggcccattaggcaggctcccagtctgcacaacctttttgctgtgtgtcggaatatgtataactggctactgcagaatcccaaaaatgtctgtgttgtccactgcttggtgagtaaccttttgttgttggtggtgatggtttggtttggtcaaatatggatgagcctgtacacaatggtagacaggtaacatttgagttcaataggatttactgagcccatatttaggaattgggtaatgtgagagttgtaaaaataagaaagggatttattattcttgacttaaagcttgactactagtgggaaaggcagatgtatacacaactcacatagtgtggggactctagcatgtgctaagtattataaaggaggtagaaacaggagtagtgtgtgcacagctaaaaatgccattgacttttgtgtgaataaagttaacattaacatattggcgtatttattttttcttcctgtttgtgtttgaataaaaataaaagaaaaaagatacctatgtccttgtaagaagtcacatagattgactgtattttagagcattcccagtgagactaatggtttttctgaccattgacttcctagagttcctttccctaactcttctcagaactcttgcctgtcctttacaactcaactttcagtaaaatccttctgactcttgagtattttcacaatacagacattcccattatatctaaatgtcttctgtggcttttaatactctgtgtcatagtaagctcttctcctgcatattttcccactagactattataatcttgcaggaaagaaccatgcctttttttaaacttttgtactgcaggcataaaaggcttcaataagtgattgaatacacaaatggaatctgagcattaatgctggaaatttcaaagcttctataaattttaaagcttctataaactttagtgtatatgtttttgctgtagtattacttgatgattcccaaccccctgtcctttcttgagagccagttggctaaaacaggaaagaaagttgaagaacattttttctttctttttacttcacatctccaaactcttggcaataaagggataacacttggtgtttgtaagaatttaatgttaaagaccaaaggattttcctttccaaggcacagcagatggtgtaacagaacagattacttttagggactaagcaaccttaaggaccttggtgattttctctttactcaagaatttgctgtaagttcagagagcctacatctgacaacttgatggaggaaagatggctcaatggagaccagaaactcccagttctagtgattcttcataaagaataaaaacccaatgaagaagaaaaaagaagaggcaaacaaaagattatggttctacagggtgctcaataagctcactcaaaaaggacatgcatatgttggaaatgaataccatgtctttgggaaatggaattgaagctgggggagggagttttttttgttttgttttttgttttgtttttttttttttttttttttgggaccgagtcttgctctgttgccaggctggagtgcagtggcacaatctcggctcactgcaacctctgcctcccaggttcgagtgattctcctgcctcagcctcccgagtagctgggactacaggcacgcaccaccacacccagannnnnnnnnnnnnnnnnnnnnnnnnnnnnnnnnnnnnnnnnnnnnnnnnnnnnnnnnnnnnnnnnnnnnnnnnnnnnnataccactggttattatattaaaaataataagcatagtggggcgtggtggctcatgcctataattccagcactttgggagaccgaggcaggtggatcacttgaggtcaggagtttgagaccagcctggccaacatggtgaaaccccatctctaccaaaaatgtaaaaagttagccaggtgtggtgctgtgcgcctgtaattccagctactggggaggctgaggcaggagaattgcttgaacctgggaggcggagattgcagtgggctgagatcgtgccagtgcactccagtctgggcaacagagtaggattccctctcaaaaaaaaaaaaaatgataataacaataggctatactagtcttttaataaaaaaccaaagtttttaaaagacctgcatcacaggtaaaaagagaggctacatatccaagagccatggatctgtgaaaagagtgtcaggaaggctaaattctgaaaataaatcagattaagaaaaatatcctttttttaaaactgtgtttggaataagaacaacaacaatttcttgaagcatgtggtataatcttaactcctttattctgttttctttatcagagggaacaaatgtcaaactaggaagaacgtaacaatgatgtttaagacaaagctggtaggtagcaagatagtacgagagcctcacaatcctccaaattaattcactctcaaggcttaaattatgtgacacaataccgaaagcacttggagaagcaattatggatttcatttgtaatatgaagaaacaggaaggagaggtgccaggcaaatgaagagaggagattttttcccaaagtatggaaggaggttgatcctggaaagttgtaggcttgtgaacctggtggtaattcaaggcacaattctgagaaagttttgcacagaagattttaaactcttagcaaaaaaggaatctccattggtttgttatgagcacatatcaaaccaacagaacatttcacatgactaatagactagttgagatagtttattggagtcctgcaagatatttcttagttttttctagtcaagattgagaaatttggctaggttgttatatatttagttgagttgaggctgaatatctgcttccaaaggtaggtgattaatggatcacctttctcctgggagaaggctttatttagttattcattttaatcaacaactttgatgaagatgtggaaattcagcttatcaattttcttagaattataagggtcacatagtgaatttggattttaaaagttcttgtaggttggtcacttaacaaaaattaataatatgaaattaaatacaagataaatgtaaagtcctgaattctggttttaaaaaattaaacatatttgcacattaccttaacatgtcatctggaaaaaatctaggggttttagtggatagagagaataataaaagcttatgttgttacttagcctacatttatactagcttgggctggggttatgttaataaaagcatagtgtccagaataaagaagatgatatttcttctctagtttggtcagaatatatctcatatctttcatttcacatctgggcagcatttaaggttgtcattttaaaacttgaatttgtttagaagaaatgtgctaaatgatgatgtctcttaaaatggaaaatcaagtgaggaagaatagaagggattgagtttgttttaaaagggaagtagaagcattgatagaaagggagggtatttcagatatgtgaaggactgccataggaagaaaggagtaggtttattttttgttctcacaaaaggatgagggtcatttagtggaagctatggaggaatgaaagtcaactcaacatattcagtataaggaagagctctgtaaactggaatgggctacttcaagtatgagtaatctccctgtcacttaaagtgttctagaagaagctaggtcacatctgtcagggatgttactgaattttgtcttaattagcttgagctgctgtaacaaatataccatagaccgggtggcttaaacaacaggaatgtagttctggaggctggaaagtccaagatcaaggtgactgcagttcttttctttctttttttcttttcgaagagttggggtttcaccatgttgcccaggctggtctcgacctcctgagcttaggcaatctgctcgccttggcctctcaaagtgctgggattacagacatgagccactgtgcccaaccaaggtgcctgcacttgtaatgtctggtgagggcctgcttctggggtggcagatggctgtcttcttgtttttcacattggccaagggcagagggagttgacagcaagctcttttgtctgttcttataagggcacaattcccattcatgagatctccactctccctacctcattacctccccaaagctccacctcctaataccatcacattggggttaggatttcagcatatgaattctggggcatacaaacattcagtccacaacagatttatttctacattgaatgaagttgaatctggtgaaggttctttattttatacgaatctaggaacatactttgcatgagatacatatatgccatatcccaacaagcagcatttacctaacctgtgagctcgttacttccagtcctaaaccaagagacttcaactattaattcaacaagtccaaaattactttgaagattatattatttttcaccaaatatatacaaatcaaattgggcttctcagattagaatcaattttattctaaggataagtctttccttgctgcctttgatttaaaaagctgaaacaaattttggttttcaagtgaataatttttaaatgaaaagcacccacagttaagaggatttctcctctctctgtctcttaattgcaaattctgccattttcaatggagaatggctgatttgatcatgttcataatgattttatgcattttctttgacaggatggacgggcggcatcatcaattctggttggtgctatgttcattttctgtaatctctactctactcctggcccagccattcgattgctatatgcaaagcgaccaggaattggactttcaccatcccataggaggtaaagtaagctagatgcaggctaggcacagatgtagtctaattggtatcatgtactgttttaaatctgccttacaaatcctttcataagtttcttttactttatctctgtattagtccattttaatattgctatgaagaactacttgagactgggtaatttataaagaaaaagagtttcaatggattcacagttccacatggctggggaagcctcacaatcatggtggaaggggaaggaggagcaaaggcacatcttacatggtggcggggaagagagcgtgtgcagggaaactgccctttatgaaaccatcagatctcatgagacttattcactatcatgagaacagcatgggaaaacccgcccccatgattcaattacctcccaccggatccctcccacaacacgttggggattatgggagctacaattcaagatgagatttggatggggacatagccaaaccacatcaatctgacattatcctgaactatgcaaaaactgaattggattaggatattagattgtcattcagtttgtaagcccccatacgaaaatttatgatgttaaaactagaaggaaactttaaagaatacttatatccaacttccctcattttacaggtgaggaaactgggactcaagacaggttgtgatttgcctcaggtctaatgcccagtggacagagccagaacagcattcttgatcccaagctctaagaccagtccctttttgttttattatacaggtctttattgaaaaacagcagtagctggttatacttatcactggtgatcctcctgtgggaaacctgatttaacaaagggaaatgcaaaaatacatagagaataaagcgttttaaaattcactttttcatgtaactctgatatagaaataaaagattacaaaagataatctgaaaaatggaataaaaaagaaaactgtttttagataacattcatttttcttttatcacaatttcttcatttttttaaaaactacatctccttaattttttggattaaaagtgcttctgatgataaaattctaaaatttatccaaagccaaattttagctgataaattggatctgctagataaaataggaatagatgttcaaatattgaagtactataaaattcccataagctttttgatttaataaataccccagtatcagttcattggggaagtacagcaatctcagtagataaaatgtttcctaaattattgatcgcattatcttttgctagttaatatttaagaaattgatagaataagtttttattataacagtaatttgcaagaagaatcttcatagcaaatattgattgcttgcttctcctgatgtgatgggccccaagagagtgccaaccttctgtttcagatacctgggctatatgtgtgacctactggcagacaagccctaccgccctcacttcaagcctctcacaattaagtcgatcactgtcagtccaataccctttttcaacaaacagaggaatggatgtcgcccttactgtgatgtactcattggagaaaccaaaatatattcgacttgcacagattttgaacgaatgaagtaagtcatgatactttacttcttcctatgtacttctcaattctcatgtaaatgagcaggaatgagttgaatcatattcttcctgcaagactatatcattgtgaaatagctgatatataaaaaatgttcaacatcagtggtaatcatagaaaagtacaagtaaatcaggagatgttatggccctttttcaaatgaaaccatgatataggctaagggactagcataagctgtatacaggattaagaccaaggggaacatgggacacctggtcattgaagaaggagatggccttgatgggattaggtgagggtaatggaagaatcactgatgaatgaggtttctaagtgagcaactaggtagacggtgatgtaattaaagaagttacagaatccataataaagagcaggtgccagtgggtggtcataggggatgtggagagaagggagtgggtggtaacataacatgaaattagtttggaatagattgaatttgaggactggcatccaagactttcacagagcaagacatttctgtttgtatcctgatctccagtggattttttgttccctttatctctgcttttagtattaatttaaagttaagaaaaggcaaatacatgggggctagatgcatttgaggaaaatgagatctgcaaagcaggcatgggcaattgcagtccagatgggatgcagagagggggcctggcattagaccagcaccatcctactgcacaaccagttggcactggctgcactcctgtttttgctcaagataggaaatagtttctgggtccgggcctgggcgaacagtcctctgggccagagccatagagaactatacctgtgtctgtgtgattgtaccagattggactctctttcaatgtatattttggtctgtgtttacagagaatatcgtgtccaagatggaaaaatcttcattcccttgaacatcactgtgcaaggagacgtggttgtttccatgtatcacttgaggtcaaccattgggagccggctacaggctaaggtatggtttttggaagaatcatggcataagttcatctgagtcttcaataggagtatttctgaatcttttctccccatcactttgggcttgagtcacttgtagttttagaatgaaaaagagcgtttaaagattgcttagctcacctccttcatcttacaggggaggaactgagactcaaagaggttgtgacttgcccaaagtccttggcatgatgtccgtgccagaggatgacagccctggaactcttagcaaaccatactctttagaagcctgtgcttttcttatagtgccccatttggatcagtgtaagggaagagatttctactgaggatgtggaattaagggattgtattttttcaattttaaaaaattgagataaaaccacataacataaaagtcacccttttaaagtgtacaatgcagttgtttttagtctattcaaaaggttgtgcaaacatcaccactaattccagaacattttcatcactcacaaaagataccctgtacctatagcagtcacttcctattccctctcctccatctcctggtaaccactgatctacattctgcctctatggatttgcctatttgggacattttatttaatggaatcatacaatatgtggccttttgaggcttccttctctcacttagaatgtttttgaagcttattgtgttatagcatgtgtcagtacttcattatcttatatggccaaatattattccattgtaatgtcacaatgtattaatcttagttgataatctcagttaataatcatcagttggtgaacatttgggatattgccattttttgctattaggaataatgtggcaagtaattgtgttttgattcatcacatattggctaagtgagtgctttgtgccagccattgctgaggtttttaggattgacaagagtaagactatgtctctgcctttaagggactcaatttcacaagggaaatccatgcaagtacaaatatgcatgataccatattagagggaggatgaggtgttataatgggagcagtttgttttagccagcagtggcctagaaaggctacagagagaatatgaacttttaagacatgccctaaaggatgagttcattgggttggaacagggcatcctgggtagaaggaatgcaatgagtcgaagtatgcctgtgtgcaagaacatagtatttagcggatgagaaaatggtttgccaaggcagagttcaagtagaggagaggctggaaatgaagctgagcctattctaactggggaggtcatttaatatccatagtaaacacaaattcagatattgaaacagttgaaggtgcatgtctccccaaaatctaatcttttgatcagattcccttttcgctgattgattgtaatgtgcttctctcatgtatttttaggtgaccaacacacagatattccagcttcagtttcacactggattcataccactggacacaacagttttaaagttcaccaagtaagtactggttgggccaaaagtctatttgaatcaaattagctgtgaagtgctgaggctcaatggcaccaggctgtagcataccctggaatcctgtgctgctgaactactgagtgtcactcagtagcacagagaggctgtgggcattctaaagctttcagttgaatatgatttatcttcagaagtacaaagggaccaaagacttcaaacagaaagttctaaaattctatgtgagggaataagggtaaacaaagcgggacaaagtatcactgcttttgatcctttgcatctgtgtatccccttgtgttttccagtggggatggcagtttaatcagtggtatggtatcagcaatgatgcatcagaatagaagccctgctatagcactgaagcaggcttctggaggacctttctgcaccgacattaacctatctcatagtgtggtctaggtgaacgcaggtgtgggggtggctagagccgggatggagttgctggggccaggataggagtagatgttcaagggctcaggacagtggctgtgggcctattgcactattttaataatggattttgccgtgccagtcacatcagccctgctttccagaatgcttttacatgcagtagcattcaaatttgttgagcaggcattattctcctcttttctctagattaggaaactgaagctcagaaaagtaaagtaacttatctggttatgactgagtcttttttagaaatgagacttagatttaacctaagagtcaacctaagatgacttctgtgccaaacatcataccagttccattgtttttcactgaatttatcttttttaaatccctatttaggcctgagttagatgcatgtgatgtaccagaaaaatatcctcagctatttcaggtgacactggatgtagaactacagccccatgacaaagtaatagacttaactccaccatgggaacattactgcacaaaagatgtcaatcccagcatcctcttctcttctcaccaggaacatcaagatacgctggccttaggaggtatgagtcacctgatggttttgtttttcaggatgaagcctctctgttatttatttcctgtgtctcattgatgctacatggtctttttgtcttgcaggacaggctccaatagatatccctccagacaaccccaggcattacggacaaagtggtttctttgcctctctctgttggcaaggtatttacaagtgtttctttaagtcacatggtttgatgattatgtatttcttctgtaaagatgttggccctagaagcagactacattaaagcagcacttagaggtcattcaatccaggcacacggactcccacctgtaagcccagcactttggaaggccaggataggaaggccaggagttcaagaccagctcaggcaatatagtgagaccctatctcaacaaaaaattttaaaaaattaggtgggagtggtggcaaatgcctgtagtcctagctatgtcagaggctaaggcaggaagactgcttgagcccaggagttcaaggttgcagtgagctatgattgcgccactgcactgcattctgggtgacagagcaaaactccatctctaaaaaattttttaaaagacatcattcaagtttacatccttccaattcattcccttttcaaatcaggcaacttccctactttcaactcagtagatgctcttagactgatgcaaaaggccattttaaactgaattctcccttctctctgctgtgtttttggtcacgtcattcctggactgacaaataagtgtgatttgtttatgatctccctttagactgctgcctctgtaatgagattaacacaggattctatcttccgctgtcaactaaatattataaaaatatcaaatcagcattccccccagggagccttaaccactagcagggcagaactgagcttaccctgctgcagagaaagcaaacacttggcctgtatatctctgctcttgctttaacagccataccagaaataagggctcgattactaggttcttttctctcaaacctggagatattttcagaatcctcctcaatataacacttccagctgctgccagcagtagcctgacgttggcatcctaatcaatacccattggctatccttgctttagagctggctgaggctaactgtgagattcagtgtagaagtgggtagtcagtgtttgggtatgaaaggcatgggaaactggctatggtatggtttatctgaaattatcctgattgaccttcctctgttgtgtgaatgtaagataatattcccatcgcctgcaggcttcagtttgatgaaaaagttgttcataaaattcctttgaattgaaagactcactttcagaattttctttcgagaaatggaactagcaaatcctcaaatttggaaaacccagtggtatctggacagtaggtagatttcttatcccctgttggcctttcttacctcttattttcctcacagcgagggcttttaatacaacttcactctttcctctccactgtcattttagcaaataatttagaggataattcctgtagactctgaaataggttttagtatagatgcacagtctcttgtctgaacctctcagagccaggtatgtttaggaatgcagaactttttggattttagaaggatgatatgctacataaactgatgtaacttgacatcccaagtgatatctcagataataacctataatcaaacatattaatatttctgcagtagaacatataaacaatagccctaagtgagataaatgaagactataagtatcttcatattcacgtctgtcagttttccaccaactgaattcatgccaaacttaggaaaatcttttccttttcatagcttattacattttataatttggaataaaggatgtggatccatacttgacttggaatgtgggtctatctggcattaaatatcaaatttttgtgggaagatctatctcagggagggcttagaaggtcactccttccccagaggaggcctctttcctgctgctcattttgtgctgacagtacccctttcaagctggtataaggacctttcacagcagagctcttcttttcactttttaaatgtgtggttcacttctgctccagactgttagagaagggatttgcttttggctacaggacacatggagaagtaaagacagtgagaagtgtcagcaaatgactagcagataatggtttgtactaccctccccggccaaagcacctagcatagtgcctgaaaaaaaaaatcaacacttaggtactacttactgttgattggagtgatttataatatcatctcatgtatttctcacagtagcctgtgcgttaggtactatttatttatttagagacagtttcactctgtagcccaggctggagtacaatggcatgatcttggctcattgcaacctctacctcccgggttcaagcaattctcatgcctcagcctcccgagtagctgggattacaggcacacgccaccatgtgcagctaatttttgtattattagtagagatggggttttcaccatgttggccaagctggtttcaaactccttacctcaagtgatcctatctcagcctcctaaagtgctgggattacaggtgtgaaccaccacgcccggccgttaggtacaatttgttatccccactttgctgaggaggaaaccaaggcacagagaagtaaagtaacttgcccagtgtcatagagccagtgagtagtgaagctgagattcagtcctaggctggctccagagttcctgctccttacccctatgctctactgcctctcagatgctcaacaagtggtagttgaatgtaacgtgaaatacatcaagtgttccactgattagggtctaaaaacactgtttgctcagggctgaatccttctgtctttctggaattatatacatatattataacaaaaaccaacaatgctgtggtcagcaactaatcccttatggtatactggccttcctcagatcagaaatcggagaagtcattctgtgaggaagaccacgctgccctagtgaatcaggaaagtgagcaatcagatgatgaacttctgacactttccagtccgcatggcaatgccaatggtgacaagcctcatggagtcaagaagcccagcaaaaagcagcaggagccagcagcccctccaccccctgaggatgtggaccttttgggcctggaagggtctgcaatgagtaacagcttctctccgccagcggctcctcccaccaattctgaactactgagtgacctgtttgggggtggaggtgcagctggtcccacccaggctggacagtcaggagtggaagatgtgtttcatcctagtggacctgcgtctacccagtcaacaccacgccgctctgccacctccacctctgcgtctccaaccctaagagtgggagaaggtaattttttctatgttgcactgtgcctctcagatttgaattctaacctttgggccaaataggtggaattgaactttcctaataagctagacttttctgatttcactgtaagtcctttagaggaggtctgtatctttatttaaattgagagcgtaagagaaaatagaaatattgtccatttgggtagcacactaaggtagtgtaagagtggacgtttgagcttcacactcttacttctaattttctttgtttagcacttcaacccctgagctgcattagtctgcttaaacatactgattgatgaattattattgataaaaatagctaatatttatgaggtatttactatttgccagacatggaatttaatactaaacattatttaattcttacagaaactcaataaataagggctatttttatccccattttatagttgaggaaatggaagcatagaattaaatcagtagcataggtttatatgactagtaattgataaggccagtgtccaaacctaggttatttgactctagggctttccctctgttttcctataacgccttcctgaagttatagttttctgaatatatgtgggctatccagagaagtgtttggttatttgaaaatatgtttaagtgactcatgccggaagcacagcttcctagaacagagcagttggtactaggtaaggagtttgagccccttgaggctctgttagtttcactgtctcattgccagagactcaaaccttctactatgagtcatctaggattttttgacatttataagacagtgtagttgggtaagcagagatccagcacagctcctgaagaacccactcaaattagctgccccttggtcctgtcaccattaaccaagatgacttcacattaggaagggtaaagagaaatgtctcaactcttcaggcctatagtatcctataggaacattttttttccccaagcgtatccttcccagaaggctctgggctggtcttgacttgtgatagttcagctggaggcatccttcatgagtgtgggtctcagaattacagagtattggtgttgaggctcaagctccaatgttagctattggtggacccaggatgtgaactcaggtgccctgaatcctatgccaatgctatttcatctgtacttcacttccttccatacagttttaacttgccaaagtgaaaaaaagctctgtcaggaaaacagtttccaagatccaagatagcagtactcgataattgcattttaagactgtgcacctggtgtgactctcatgatttcattcatcatagtttcaggcagctagtggaattccagtgccagaaggggccttagacatcagnnnnnnnnnnnnnnnnnnnnatcagttaattctctgcctcatgttatagacaatgaaactgaggcttagtatgtattgattgacctgtctgaggatacccactgggattagtggcatacccaggtctagaatgcaagtattctatccccccaagaggaagtagaaagaacaccaagtctagagttaaagacctggatttgaatcccaggacttaactgtctgtgtaacattattgaaaaatcttctcagttgtaaaatggggataatagttacatattagcattgttgcaaagactaaattttgagctcttgtcttgtggtgttgggcagttttagttattggagaatgcccctagtttaacataaattgatattttaaatgtactgagtatggtaagaagggataaggctagataacaaataaatcctgctcttaaaaccgaggtgggatatatggcttaatacgttttcagctaagacttcattggcataatgctctcctaacaactgctgggcagattagccttgtgtagcagcaatggtatcgactgtagttcatccaacaggtaagtccagactactcctttgtccacaaagataggaaattcttggagtccactgttagccctacaggaagtgacaattctgtgacatttagtgaatgaactcatgggacaaataaatatattttcccattgttttctaggtgccacctttgacccatttggagcaccttctaaaccatcaggtcaggatttgctgggttcttttctgaacacatccagtgcttccagtgacccctttctccagcccacaagaagtccttcgcccacagtacatggtaaggaaatattttatattgtgttcagtggaacatagttttctgcaagatatcagtaagtgctcatatataaaagcaccctgtgggtgcttttttgataaaagcttcctcacacatctctgtttttgaaattaacaactcaccttaacatatcaaaatctctgggctgtcttacaggacagaaacctgcttaactttgttttgctctgctttcctatttgactatggtatccttttttgcattagagctacatggacagaatcataaatgacccttgattgtaggacatatgattattttatgtaccaataagaaagaaaaaaacactgccactatgaaatgactggaagatacttcttggttagagaaatctttgaaatgtgggaaaatatgtcttaaataaataaaatatgttagtagtccacaaaattggtattccaaagaacaaagtttgggatatgatagccactagttacgtgtggctgttgatgactctacatgtggctagtctgatttgagatacactccaagtataaaatacataccagatttcaaaacttagtacaaaaagggcatgtgaaacatctcatcaatatttttatattgatcatttattaacataatatattgaacatactgggttaaataaactatattattaaaaataatttcaatagtgtctttttactttttaaaatgtgactgctaggaaatataaaattacatatgtggcccaaattatatttctatgttagagacttaggttgtatagaaagagtaataataatcacatccatttataaaagtgtgtcacttaggtaacattgattaaaaccggaggtctgcagtgagggataaataactttgagccagagagttgtagctcattcctgatgtcgaagtctattgaacattattggccacaacctagaaggtgacgtattgttgaaggcatcctgagcttgcttggagaatgcagtccagtcatcagttgactttgggaaaccatgccaatgcaaaaggaagatgacttttgcaacactggtgaaactgaaacttgactaaaaaagattccaggaacaacttttgtggttcatttccaactagtctttaatctcaaactatttgaagtgcatcctcaggacaatatacaagaaattcccctcttacctctgagtcatgctcacttgagagagtctcctgattggatgttgactacctgtaggagaaaagatgcaggaatgtagagtagagttggttttctcactcatttaaaatgttaagtcatgtcattgctctgctcaaaatgcctccccattttactcagcatgaaaaccaaagtccttgaaatggcctgtgtagcctctgtatgctctagcatctcagtgcccgtgacctcatttcccattctttcccactttactctctgcattccagctgtactggcctctttgctgttgcactggctgtttcctctgcctcatactcttccccaggcatctgcatggctaagtccttcacctccttcaagtgtttgctcaaatgtcaccttctcagtggagtctactctgattcctccgtttcaaattgcaactcgtctccctgccctactctacattcccctttctgttgtgcttagtaacttccagtatatgcagtaattaacttatgtgttacatttttttgtcatctctctctctctattagaacatgaattccacaaaggcagggaattttgttttgttcattaatgcatccatagtgcctaaaagaattaccggcacatggtagctgctatctatctttccaatattaaatataaaatgaattaactcatttttcccatcaaagtttctttgatgcacagtgatagtgtcataaggctatatgttttcctgattttaatactttgaaattattgttttaataagagtactaccctttgtgtcccatggacgtgggtgttcatacttggcagcttggcagttttggatccagttttctgtttctgatgagctgattagaacatggtgtttataacccagtttaggccagttagtactcctttgttttgtggttacatttctcattttggtctgtattgtactagcgagtggaaagaattttctcctctccttgttgggaaagcaatgatcatttcactgttactgaatcaactccccgtcttcacataggacagaatataggtgacactcagatgtctgctttgggaggtcagacatcctcagggtacttcccccgggtttctgcaaggcgtcgccaatctctcatgaaaataaaaaaaatactgcctttgggctcaacaaatatttattgaacatctattctgaagagaataatcacttgggacatgatgttggaagaacaaataaataatcataataaaaggcaaaatagagactaaaatattaggtaattacctttttgaaaaaatatattcctgtttctctaacagaccttaagtttcttgaggatagataatgcatctttcagtctctgtcccctgatgtggtgccttgcatgtggtaggtagtcataagggtttgtgggtttgattagcaacagggttgaagttctgatacctacttctgcgtcttaattggatgtaagactaggatcagagcttaaaggaaatcagatagaacgtactagcaaaaccgtctaacttccacctcagtggaatgggttactgtgtaaaaatagaagggataaatagaaaagaaagaattattattgctgataatggcatatcctttttaacttaatgatgggaaggtactagatgacttggttggtactaagtaaacaaaacaaggaaataaaaggtttggaatgctaatcttgatgccttctggtggtgatggggtgtgtgtgtgcgtgtgtgtgtgttttaaatcccagttgcaatgtcagtttagtatttgcattttaataattgatttgtgtgggcaaaacctagaggtgcctcagaaagaaattcttcatcatggcatcctgtttcctatatagattttatagatgtgtaaaaaacttactacgcacatgtattcctctagtacacctgattccttttagccaaatatttcttttaaattatatgtttggaactttgagggggggtcagaatgatttattttgaagctgtaatgagtttattttgagtaccatagacacatccctgacaaccagcatagtgatgatgtatagccagtgcccagtacatgttctgcatgactcattattctcaactcatgtcacagcagaggagaaaacaaaatgtcagttttgagtggattatgcttctatacttaatgcttagcaaaggtaaactgagcttaaggtgttttcccccttttcttattgcacactgactctgtgttaaatttagaggtgggacacacacacataagatagttctttcctgacttcgagggactgacaattgaatggagacagacacatgctcaatgataactcaaagcgtgtggatatggaggtaaaaccaaagtgagacaaagaaggagcagagacaaataatatgtcgtttctgtcaagcctcatgtgaacaaccagaggtgaaggcagaacatattgaatgttgcagagtgtggcaagaactcagaaggaggagtggatatcttgggatcttgctggggccatgcaggcttcagggatggaatggcattatcctgtgtgaactcagaaaagtgggttctgagctctcttgttctcattctttttcttttccccatttgcagcttctagtacgcctgctgtgaacattcagccagatgtttctggaggttgggactggcatgctaaaccaggtaaaagcaggttattttctgtacacatttatataattgcaaaagcataatccttacccaagatgaagtgagtactcacagagtattgtggcctacctgtgtaatttgtgtcactttttcctaaagattcatattctagaagagcttttcccaatgcacttgatgacatgatagtgctacttatcatacaccatttaacttttctaaatttcatttgctgaatgtcttatcttgacaatagaatcagacggatataaatatatatcaaactctatcacttagaaactcttgggtttttttggcaagtctgagcctcagttttcttatctgaacaatggggataataattttggtcccacatagttgtgtaagtttaaataaaaaaaacttatataagaatttctggcacagtgtagcatgctgacaaatgtgaatattcttccttctttacaaagtacttacttcagggtgggatttgtctgtcatcaacaaggtctcctcctcatgaccactatggcatttatggagctgtcttgtgtgactgctcctgacattgagcaagttaagtgcacgcgtgcacatacaaacacatacacaatgggcttatcacaacaactttctgaagcagttgctgtttcctttttttattgtagcaaccccttccccacaacgtaacatttaccctgccaataatttccaagtatacaatacagtattatcagctacatgcactttgttgtgcaacagatccccagaacgaacccacctccccactgaccttctcacataactgaaactctacactcactaaataactccctacctctgcctccaccagcccctggccaccacccttctacatgagtttgactactttatatacctcccataagtagaatcatacagcatttgacttttgtggctggcttatttcacttagtataatatcctcaaggttcatctgtgttgtaacatgtgacaggatttccttctgtttttaatttaaaaattttttttggctggggcgtggtggctcacgcttataatcccagcactttgggaggctgatgtgggaggatcccttgaggccaggagttcatgaccagtccgggcaacatggcaaaaccccatctctacaaaaatacaaaagttagccaggtatggtggtgtgtgcctgtagtcccagctacttgggaggctgagatgggagaattacttaggcccaggaggttgaggctgcagtgagccgagatcacaccactgcactccagcctcggtgacagagtgagaaacctgtctcaaaaaaagatttttctttaaattgacagataaaattgtatgtatttgtcgtgtacaatatgatgttttgaagtacacatacactgtgatatggttaaatgtagctaattaacaaatgcatttcctcacatggttatcatttttgtggtgagaacatttaacatccattctctttggatttttcaagaatgtagtagatcatcattaactagagtcactatgctgtacaatggatctcttgacttattcctcctttctagctgtaataatatatcctttaaccaatgcctcctcatccctgccctacctccaaccaccccagcacctggtaaccaccattctactctttatttctatgagaccaacttttttagcttccacatgtgaatgagaacatgcagtatttgtctttctgtgcctggcttatttcacgtaacataatgctctctaggtttatccatgtcatctcaaatgataggaattcttcctttttatggctcaatagtattctattgtgtatatacaccatattttatttatccattcatccattaatggacacttaggttgattccatatcttggctgttgtgaatagtgctgcaataagcatgggagtgcagatatctctttgacatactgacttgatttcctttggatatatacccagtagcaggattgataaatcatatggcagttctatttttaatattttaaggaatctccaaattgtttcccataatggctgtactaatttacattcccaccaactgtgtccttttttctctacatccttgccaacatgttttttgttttttttaatagcaattctgacaggagtgaggtgatatgtcattttggttttgatttgcatttctatgatgattagtgttgttaggatttttttatacatctgttggttttatacgtctgttggttttcttctggtattcatctgtatgttttcttctggtaattccatagttttgggtcttacatttaaatctttaatggattttgagctgatttttttatatggtgagagataagagtctttttaccctgttgccttcttattctgttgattgttaccttccctgaacagcagtttttagcttgacaattgtcccatttgtttttcttttgttgcctgtgatgttggtttcatattatttctcttttttaaaactaatggtaaaatgctgaagctcaaagatgttaagcaagattcccacggtcactcaggaattggcaaagccagaatccagatccagacctaacttcgaatcttataggaaagagtgaagtcaggtgacatgaggacctggaaataaaacaaacactggaaataatagttcacacttgtggcctggaaacagcatttgtcttttctgtggtctgtccttgttcaaggccaccattcacccaggtcagggaaacagggtctagcaacttcttagacattttcaaaccctgtcctaatttgcctaggagacaaataaacagtaactctggaattctgaatttcagaattcagcctcaaacaactaactcattttcaatgaccttatttccttttcaggaggctttggaatgggaagcaagtcagctgccaccagcccaaccggatcctcgcatggtactcccacccatcaaagcaaaccccagactctggatccttttgccgaccttgggacactaggtacaaactcagaagatcaagatacaaataacatttatttatagctataaagcctcaaatctcagtctttggtgttacagcaagctggtattgtcacctggaacctcaaatagtgtgtattcttaagctatcctctgaaacctgagattggctttttaaaaaaggaaagcgataatcagatgtggggttagaaatcatctttattgattcatttctccagtgcctaattctggatgtgtagcatgaataaagttagagctttcaggggctcatggcaacagagtttggctgcgcaaaagtaatgcgtagggaaacagtatgagacagggctggtcagatggatttgtgccacatgatgccaaccttgcagaacactaactgtgatgcggtgatgttacctgtgagatcttcacaccgttccccttctctccattaactgtggtgctctccggtcaatttgtaaaattctatacagaaaatagactcaagtatcgtatttccagaatattttcaccatatgttaatagatgttacaggataagtgttctgagagcaggtgagattgggaagcactggtttcagtggattttgattaccactaagagggacacagtatccagagttctcaaactgatttcaccaaggagcctgttttcaaggaggggttcactggactactatgttctgaaacattttcttcctcctttttccttcctcctctagggcagtgcagatttgttaaataagggtggggtagccctgacacaaaggtttatcttggctatattgatagtctgtgatctcagaaagccctactgaggcatttagagccagatggagggaatgtgagcctggctaccgttgttgtctgtaactagtgtcagcatctttatcttccattctgtactatttagatgtttttcccttttaagaactctcaaaattattttatgcagtcattttcttctccacctttctttgtatcttactgaaaatttcaaattttaaagtaatattatatcagatgaaattttacttcaataaaatctcatttattatttatttttaatgcatttaatgcattgattcatccaacaagtatttaaggcacttttgtgccttctaggtgctaggactgttttagtaaaaaaaataaccaaacaaaacaaaactcctgccttaataaaacttacattatagaaggggaatcaaataataaattaacaaatatataatgtcaaataatgaaaacaataaaaataacagttaatagttattggggccttactatgtgccaggcactacttaaagtgttttacatatatcatttcatttaatcttcctcataatcttttgaagtagtgactgttataatcctcgttttacagatgaggaaacagggacacaacaggttaagtaacatgcacaaatcacaagctttcaacaccaagaagtctagctctggagcttgcactcataaaaggtttagaggttgatgtagctgagtgtgggaaggggtatcagttcagttcatccagtcaatggttttctacccttgagcattaattccctcatttcacaggtatttttgagtacttactatgtggtaggcattcaggatgtaataaagaatcaaagctgatgatattcctgttctttgaaacttgcactacagtgggaggaagaaactttaatcaaatgtaaaatatccgctactgtaggggctacacaagatggagcattttttaaaaagctccccaggtaattctaatgcacaatcaaggttgagaactactgctttgcttttaatgaggactgcagtggtctctggatttagctaccactttgtatttctgtaagttctctgcttcaatagcattaacaattagacttgctgagcatggggagaaaatattctagaagggtagacatcagagagtcctgcaatgttgatgagccccatgagtgcggggtcagcgtctgctttttcaccactgtatctgcagcctggcatctagaggatgctcagtagtgtttcctaaattaatgaataactggcagtgtggtaggcatatggcaaggttttcttagttctttaggcttttctgtatttaccaaattttaaaataaaaaaaacacatatgttcagaacagagtaagcttccttaaatataaaatgaaaccccagtgtagaatgaataccaagttttaggtgtatgttcccgtgctattggcaggagggctctgggacataggaagaaggaattcatgctgctagttatggaatgagtggggcaatgccaagcttgaagacaagccctgtcattacattttcctatcaccaagtgtttattgagccctgaagatgtaccaggcatgtgcttattagcatatgagcttacattattttataatatataacgtctctttgtttgcttaattgtgtaatactttcctatagttgttgtgtctttacagtatacctgtgatatagacatagttttgattaaacagatgaagaaactcaggctcaaaggagtgagttttttttacccagctttagaagagcaaagattctctatatcctgttttcagctatattcttagtgcccagcatagtacatgacacttggtaatgctcatcaaatagtggtgaattagtgtatatatgtatgaatgaatgaagaacgaatgcaagaatgaatgacagagctgagactcaaactcagattgatggtaagtccagtgatcatgatgcatttccagcagggaaggaaagtggagccccaggatcagaatagggaaagtatctatagaaagaagagatagtaagggatgagttgtagtgaaaggcttagcaattaggagaggaattaaggattactgagtgcagtaaatgaacatgacatttggaggtaggatgcacatagtctaatcccagctccattaattggctgtgtgatcatgagtatatcaggaaacctctctgagccttaatttccttatttttaaagtggagccagtgatactacttacttcctaagagtgttgtgtagatctgagcagtaatgtacataaacacattttgttaactctaaagagctatataaatattagttattttattattgttactttagacttattacatgaaagggtctttggacatcagcacatttcagttttctcattttacctctttaaatgcaagccacagctggttttcatattttggacatagcccagcttgtatgcaatgagtgcttaaaagtttggagattatggaatcaagattctacttaaattcctggcacaaaataacatcattttcaaagcttgaataagatcctttgtcctgtttaaagttatcagaatgttgactgtttttgctctccttcagtgaaatgcaagtagtatgaagttaaaacctacttgtgaaatttcaaaacatctttatttactcttgggcactaaccatgctttataacaaaaaatgatgaatcctaataattgaagtttaagtagcaccttaatgagtggactgttttattccccattcttgtcatttggtggttttttttaaattttattctagtgaagaaacagaatctgctcagaagatggaagggtggggaaggatggcacagtgggaagagccagggttcttttgacctggaggcaaagatccagaatcaagtctcggctcagctacttgctgtgtgcctctgagaaaaatcacttaactgctctgacctgcagtttgttcatctgaaggaaaaatgaggccattaaaacatacctagaaatgttattgtggggatgaaggaaataatatgtatgcctgcaattgctttatctatattaggaagattacttatgctgtcagtcaagggaatgactattaaagccactgcaaacagtgtcttaagacacaagagttagaggccactcaaaatagttttaccttctttatctctttttttctttaggtagttcttcctttgccagcaaacccaccacaccaactggattgggtggaggattcccgcctctcagctcgccacagaaggcgtctccccagcctatgggtggcgggtggcagcagggaggtgcctacaactggcagcagccacagcctaagcctcagcccagcatgccccactcctctccccagaaccgacccaactacaacgtgagcttctcagccatgcctgggggccagaacgaacgtgggaaaggatcaagtaatttgggtaaggataatggtatgggacctagctatggggcagcctgtctatgttgtcatactgcctgaatgtgtctctctgaaggtgacagtattttctgggtagtttcaattcagtagtttctgagggaatcttatagttgtagagataaaacatgattcctacccccaacgctgtacctggaggctcctaggttgactatgctcctaacttttataccattttgtgaccgtgggctcacttggctgtttatctccagactggaaccagatggagggcagggactgtgtcttagttgccatggtatcattagcacctagcatagtgcttggcatagggtaggcactaaatgaatgttgaagggatatgagtggagaggtagatggatcttaaagctgttattcctttggaagaggaagtggaagaaaaagttggggaatctttcaagcacattggtcatatttgccctttggtcccagttggtggactgcatgtgtcttggaaaacttggtctttcttatgctctgcttggtggattcctgagatcagcggggtacctatgatggtgccaacacctgaggctggaggatactctggataggatcttgacaatgaatgaaaagtaatatttttgcataggaaggatggttagatttgagtttattaaaagcctattttggtacattttatatttcagctgattttgtcagaccctccaatgaagtacataggaacatggtgagggaagaggcctttctctctatggaacatggaaaggcaattcttatgctcttcctaatagctgtagctaacatttattgagtccttactgtatggcaggtgctatcctaagcatttttcatgtacaggcatccccctttatttgtggttttatttgcagtttcagttacctgaggtcaactgcagtctgaaaatattaaatggaaaattccaggaataagcaattcatacatttcaaattgtgcactattatgagtagcgtgatgaaacctcgcactgtcttactccatcctgcctaggatgtgaagcatccctctgtctagcacatctatgttgtattctctacccacccattacttacttagtagccatctcggttatcagatcaaaaaaaagagtactgtatatatagggtctggtactatctgcagttttaggtgtccactgggggtcttggaacataccgcctgtgaataagtggagggactcctgtattatttcttataatcttcaaaaccaaccgcatatcataggaagctgtgacacagatcgatgaagtaatttcctaagtttatacagcttataagcgacagagccaggattcgaaccctggcaatctggctccagaacccctgcccttcattgctaccctctactggctagaacacaggtgctcacaacaccagcatgttaggaattcagttgtcggggatatgtaacatcatgtttgttcttgactagcagggatatttcctggacaattccatagagtcatgccaattcccctccatttttgagtagatagatgtggggcgagtgacttcaatcagcaaatacttatggagcatcttcagtgtagaaaacattgaggatgcagcagggaacaagaaacaaaatccctagtttcagagcacttacatttcagtgtgtgcaaaaacaggtatgtgtatgtcttacagtatagagatagcaaatggttttcaactcaaaaactgattttggttgatttgaatcgactgtatggactgttatgttttggttctattttgttttaacaagcatttagatagccaggcactgttctaagcattttaaatgttaactaattcattttcaaaacaagtccataaggtgagtaatattcctaacaccatccccattttatggatgaggaagttgaggagtagagataataagtaacttgcctagattacatcactaataagtggcagagctggaatgcaaacccagggagttggggtccaaagtctttgttcctagccaccatgctcggctgcctctccaaacaaattgagaaagattaagaggctacaaccagacttggagagaaagagcaaagtgattgactaaaatatcaacagaatatgggcagagaagtggtagcatgcatgaatttcaagtaccaaaccgagatcccagtgccaacactgatatgagttagttataatctggagggataatgagtatcctcatctaaagagaaggtacagtggaaatggaattggatttggcttcatgatccagcctccagttttaaccttgccacatatatgattctggacaggttcattttcttcatctgtagaatggatgcaacagtctcttaccctactcacagggtaagcaagcatgagggttaaggactgaatgcatattaaaaacaccttgaagactccagatgctgtgagataatgatacagcattatgtttaagaatgaaaactgtaatgattttcaaaaattatattgcagaagggaaacaaaaagcagctgattttgaagacctactctctggtcaaggtttcaatgctcacaaagacaaaaaggggcctcggacaatagctgagatgagaaaggaggaaatggccaaggaaatggatcctgagaaattaaaggtgagtgaggcccctgacgcagcttgattatcctatatgacaaagtcatgtgataaagtcatgtgtatggagctatcgccatgagagtaacctattgtcttagcccattcaggctgctataacaaaataccataaactaggtggcttataaacaacaggattttttttttctcatagttaatgaaggctgggaagtccaagatcaaggtgccagccattttggtgtctggtgagggccatcttcctggttcatggatggtggtcttttccctgtgtcctcataggcagaagaaagaggtcttgctcaggcctctttcataaggacactaatcccatttataagaggtctgtctcatgaactaatcacctcccaataggaagccctaacctcctaataccatcacctctggagttagaatttcaacatagcaattttggggggacacatacattcagaccatatcacctataaaaggcatgatagtagatttctggtggccactctatttcatttggtctttgcagctgtgatttgagtacagctgtgccctttaatagcaaagtagctctgaggaggttgcacacactgtttactttctttaataaaataaatgttattccatgatatggcaatatagatttcttttgtttgcctgttcaaatgagcagtggcactttctaagaggtgattttgttattcagatggcattcacattctaaagatgagtcattagaatttgctggtaagaagaatgcattatttatgttttctctttctgctttgagagcttttttattaaaccagattgactgaagcccccaggatcttttctctaccgatagagaaatatttatgtacctgagacttaccaattcctgcaacattagacctggagctttggaaagtagaggagagaaaggctgagggaagtgtggctcctgtcttccccattgtctccctctacttttaaccaaagcagttccacttttctctctttctgattctggaggtttaggtaaaattagatttgaggtttttcctcaaatcagagtcaacatacttttttcctcaaatcaacatactgttttagcatgtttcagcattttgtttttttaagtttgcaattcagcgaatctaacccctttgtttcacagctgaaaaaaaaccacataacttcatagatgaagatgttgtatggacaggcggatgcggattagctgggaaacagagggtggttctgttgatgagtggtatgaggtctggaagagtttgtaaagatcaagagaattggaatgctcttcacagatggagaggttgagttcctatgtgacaaaatactaaatatgctgatactacaacaaactgaaagaggaggatgtaatctgtctctgtattaaagcatctgcaaaaccagtacttaaacagcaagtcaatcttaacacattctgaaaacatataccaccgttctgtataatttcctgacagatttgttgcagatgtatataatatacatctaatataacttagattctttgatacattttttagtacaatgtagggtctttcatttgcatgtttttcactccacccaatgtcacagaagcttaatatttcttccaaaaactttgtgcttcatctcaataaccgttgttcattaggcaaattcggacagtttcctataaaagaaagctgtttatttcatttaaaccatgtttgattatttaattggtacagggtatgtaattgtttgggagggtagctgtcattaatgtgactaaaccattcatccagcaacactcacttagctgaactcctgttaggtactcaatgctgatacagttttatgatccctctgacttaatcacctcatttgttcaaactgtgaatgttcatagttcaaataaatggctaaatgggtcaattcacgtaacaagcctttttgagctctgttctgcaccaggttacttatttggttccgagatacagtgatatataagaaataatacttttcctcaaacagctctgcctaatggcaggcaaagagaaacacacaattacaataaagtgtggtacatattatggtagaaatatgtttaaggtagagtggcccagagaagtttggcccttttttaaggtttacttatttagtgcagtatctaccctcatggagtttatattgagtataactctgggggtggggatgggagagaaaggaattcaaactcgcaaagtctaacagtgtgaaatttctcagcacccttttgaaagatgatagagttaaccagggagacaaggtaggagattgaggaggagaagcattccaggtagaggaaacagcctggatcatacaggttgccctaagtgttttgatgttgctggagcagaaggggtttctagagtcctagtggaaaccttctgaactagtaagtaagcatttgaatttcttaatcccctttgtgtttacagattctggaatggattgaaggcaaagaaagaaatatcagagcccttctttccacgatgcataccgtactatgggctggggagaccaagtggaaaccagttggcatggcagacctggtaacaccagagcaggtgaagaaggtgtacaggaaggctgtcctggtggtgcacccagataaagtgggtataacctgccctgttgtgtaacttgtcaggtccttgcttcattatcttatgagtatgtgttttactttaaatgtgctggttcatatggcctatttttaataaaattaagtcaatgagctaaaatcagatatttaaacaaatagttatactttatgaaatgagaaagacgatatcaaactatatattacaggggcttatttagagagagtaagatttacccagtgattaatttttagggctcagaagtaaattgtgtctgagtacggtggctcatgcctgtaatcccagcactttggggggggcagggtaggcgaatcgctcgagccctcaagtttgagaccagcctgggcaacatgacaaaaccccgtccctacaaaaaaaataaaaaaattagctggtgtggtggcataagcctgtagtcttagccactcgggaggttgaggtaggaggatcacttgagcctgggtgatcaaggctgcagtgagctgagatcgctccactgtactccagcctgggcaacagagtgagaccctgtctccaaaaaaagaaaagaaaaagtaaattgtgtcctggcttacaatagtaaggacaggctaagagctggacagaagaaaactcctttcctttagagatacagcagtatagttagctaggatggtaatgaaaaagcttcagaatgtagttggtaaaatttgtgagaatcaataaaatattcagaatggaattaaatttgccctctcttgattattactacattgattatgtcagtttatgttttcattgaagtatatatacatctaagggctctaccttgtcagaaacttcaagtaactcatggacaaatgaaatcatcatataatacatagaaacattcagcaagaagtgagtcatcttgctgtcacatagactataccagtcatatgacatgaagctatgatcgaagtgccacttgggaacacaggcttgaatttgatgcatatgattttcatctctccacatttttttgtactagtctgaaaagaagaattaatgagaagcaatggtagtgcttgaattttgatgaatcaaaagagaaggagaaacaagagcccagaaaaatccacaaactgtattccccattatgactctcaaagaactttttagaaatgggaaaatgggagttaaaaacagtcaatagagatgggctgtcatgaacctttgtcatttggcagatacgtctggagaacagagatacgtcttgtgctgcctgataagctctctgttgtctacttcttgatggattactactacccttgtgcatttctagggggaggtcattatggggaggttatagtaatttgggtcagatatagtagattaggctgaaaaggagaaatggccaaatagaaaaacatttccattgcttagagcccatatattggcagtgaaaaatttaatattaatgaaattttggtctgtggtatctaatgtgtgtttttgttttctctacaggctactgggcaaccctatgaacaatacgcaaagatgattttcatggagctcaatgatgcctggtctgaatttgaaaaccaaggccaaaagcccttatattaatttatgagcttttccatctctgctgcagacctgtgctaatgcttagtgtgtgtcacaattctgaggttttcgcagatgaaccaaaaactccagtaacatgttttcagtactaaaccgttaagttactcatgaattaatttctcattgataaggaatgtggatgtttggtttctccaaagttcccaccataaaagatccaaagcatgagaggaacttctagtcagatgaccttgcagaaccaccgcattccaccctgccctttggggagcctactcagcattctacctggggaaatggaaaacagaggccaccacccatgaaggcataacacccatcacattgtctgagaataggattaatgagcaaaagttatgataatagagttatatgatggtttaatggtttctagatttttcttggaaagatataatttgagcagtggctttatgcagactccaagaacaaaaccaccaggtatttttttttaagtaaaaatttactaaggcctttagcataatactgtaaatgtcttttggtcaagagaactaacaaatataaaggaacttgaaatgtggggagtgataatagtccagtgattaaactacagtccagtgattaccaccaactttctgactaagctaaaaatgaatgaaaatggtggctaaagaaaatagggactctgaagatgtcgaaatctttattcctggttaggaaggtgggccgctacccttctttccctttagaaaactgtgattaattaaataaaaagtcttactactataacaactctaaacctggtttaaatgaaacatctaattttgctgtaaggcttaatgctcttcttttgtttagccaagaaaacattcttagttggaaacaggtggtaaagtagtttggcctgttcacaacttatcaggaccaatatctagtgtggactcagtgttctctaggtttgtgagcagttgtggtaagagaatggaaggcaacactgaataggagttaagggaatggcacgatcacagtgagagagctgcactcacctgcagacccagtcagatggcttgtcagtatctgctctgaggaaccaggtcccacctccccacaaggcaaatctagacccattaaattattacagtgggcttttttgttttaaaagtggttggggatccacaggaacgacattcatacagggacatttgtgaaagcaaagcaagaatgaatgctttcccgatctcagactggctggattcagatcagtgtgttggctggttctcattttaaggggtaagcagtttgctattctgtgactttagtagatctcttttgtgtgcacatatacaatgtgcattatacatatatattaaatatatccacaaagcagatgggcaaaaagattttcatgctaatcttcaaaggttcatgctcaatattgtgaaaagcttttaaaagttgttttgaaaagacaatcattttttgtttttgttttaactttcttgtggcaagctataccggaaaagcggcatgtcaaaaatactttaggttctacatagatctctttctctcttttgttttgtttgtttgtttgttaaagttcattatttattttaccttttactgacaatgtgaaactcgaagaaaatgttctctttttaaatatacagtcataaactgttcaaggtaaccataacaaactaggtgttatttattaacgtattataaaataatgtttgatccagtatgtgcttgtcttatttaaaattggaatgtgagacatgttgctgtgacctgtttttctttctcattcacatttgtagatattgtgtgaactacagtatataatgataacaattaaaaggatattctgtggatgtcacgtattttgaaatgatagaactacattagctttgtatcatgtttggataattcatcaatgttcacagtttaaaacatcattaaacattatgtaattacaatgagaaagaatcttacttaaatttggagattttcccccacatctcttttccggatacattataattctggacccctatttatctcaaaactcttaatatatgcagaccaacaggtctttgcattccttttaaataactggttgtgacaaagcttgttgttgatcagattcactgtttcatcatatttattgtaatatattttttgttttgtaaatatgttacaacaaaatgtgattggtctaaaatatttgtaatgtatattaaaaggttcaaaaatatttgtataaatctaagttatttgggtacttgtaggaatacaatgaggagcttgaatgccaccttctgacatgatttacttttaaggaaagttatgaggagagaatacaaaaagcatgcaccaaaatgtaatctgacaggatttctggatttatacgtaatcactcctgccccaacacacacacacacacacacacacacacacacacacacatgcacgcacacatgattttgattatgctacatgatatatgtttcaaaaagaattagcatagaaatcctggtctcctagccaaaaaaatcaaaggattttcaaaaaaacgaatctgtatgttgaggcaaaaggattgaacctggaagtctgggactttatcatagaaacaaagtctcagatattttagttctttggaaacaaatgctgtaattcaaaagcatttgacctgtcactgtactatctacatgtggaagaatgttcaagttgaatcctaatgccgtgaatgaaacacagtctgtgtagggaatgagcaaaaaagttgaattcccattgctttttggcccttttggctaaaataaatgtagcatctaattttatcagtttaacatctgatatgtcttctatccatgtacaatattttaaatggattttgtggagcagggagatggaataggagtttcccccacccattccacacatcagcctggtaatgcagtaactgcaggaatagttcacctccgcctcactaaaacaacaacaacaacaacaaaagacaaaatttgaattccagaaatagttattgcagcaacaagtcagtctccctgctggaaacacctatcagggaagctggctcaagtagcagattttgattattctaaagataaatcatggtttttgggaatagtgatacatgttggtttgagattaaaagactgggtttaaatcctagtttttccatttatagacttttttttttttttaagagagtcttgctctgtcacctaggctgaaatgcagtgggtctgtcacagctctctgcaacccctaactcctgagctcaagtgatcctctctcctcagccctcttgagtagctaggactgcaggtgagagccaccatgcctggttttttttttttttttcagacggggtcttgctgtgttgcccaggatggtcttgaactcctggcctcaagtgatcctccagcctcagcctcccaaagtgctgggattacaggcatgagccactgtgccaagccttacagactcttatattggacaagtttcttgaactgagtcttaattttatcacctgtaaaatagaattctaacaaccctgcaatggaggaattaagaactgtgtatataaactcttaacaagcgggtactcactaaatagtaattattgttattgttactgatagtaaataagacaaagtatatcactgtaggtgggtattggagctggaattacatggaaacctcatattctagggagtgacacaagtaggaaaaggcaacccaaagttacttttaccttggtccttattccttatctccttgggtttacagagatctgtctacataaaatggcaaagaggtttgcattgtagtttctgtaaagggaatagctatgtaaaaagaagtagtgattgagcattaggaaggaaaaccaacatttacggatttcaattagtgttgcatcattcttgcatttaacttatgcactgacttgcaagcctaccccagtgtagatataacatcctggcatttatcttgtgtgcactgccctaggtgttaccatatatatatatatatgttttatatatatttttttctcacttaattcccccaaagattctgagacaggtttttgtaaatcttacctcaggaagctaaagcatggagaaatttacccagagctggagcttgaggctatatatttttttttttctgaggatagggagagatgatactgtgtatggtaaacttattaatatttgttaattcagccaacattttgtgtatactgtatgcaagatgctaatagatatgctggagaaaattaagacagtgaatggatttgatgccctgtgaagcataagaggttactgttatttctaattactacaagaattcttgcttcttggtgcataagatctactgtggggaatagtacaagtgctgaccatctgactttagagctgaacagtttgggacttgatctcagcttccctattcactggttactgggagcttgttttcctatctgtaagatagaggcaataaaacctagcttatcatgcgagactattgaatgcaaggagagaatattaaaattcatcccagtaagtccactgtagtcctaggcagcatgacagaggtcacagatcttacaagtaacatatcaatggcaagttggggataaggatttggtttttagggttttactttctgtttttgatgactcttatttttgagaaaatgtggaaggagtaagtagaagaacagtttttttcagtgcaacatcaggcaaaagaaaagcagatttttttcagatggttaaagcctatggcaaaatagctaactttctctttaaggtgattggtaacctggaaaggacagctggcgtgggcagaaaacttgttcaagacaaacactgtcccagcattttttaaattccagacattaccctggggcaaacacctcaactttttctttcataccaccttccaatatcttactcctgagcctagggtgctcaaaccaaactctgcttctgatgtgttgtcagttttctctaaaatcacttatcttctgtgggactggagtcaggctgatgtggaaggctcccgcaaaccctatttaggctctctggagacagaatgggtggttggaaatggaagggggaatgagggaaatttaaccccatagaatatcttccccatgagagtagcttagcactacacgaagaaagctaaaaaccacagacttccagggcttgtctgatacgcaggttcccttgagtgctctaataggtattagaaataatatgatagggaaacaagctcttgtaggggaggaagaatctttttctctacctatcttaggttctccggctgggtccttgtgcattagactggccaaagacagatgaacaaaagtaaagcaagtttatcaacacgtgcgttgttcatataggtaacatgggaatactcagagataagcaactcaaagatttggttagaacttgggtttatacagcatattagccaaggaacaataaatttttaaagaaatgacaagataaaggatcttgagtctctaggggcagcaaattgtcggaaaacaaatatatgggagactagttgcagatgaaggccaaatactaaggtttatcatgtagatttttcttgtgttgtctccaggctgacaggggtctaaaattgtctctggtgattaatctttgtctttcctggtagagcaggaaggaggtacaccttcgtaaacttatatcctgctttttggcaaatagagggagggcagagtgcttttctagtaccgtgtacctatttgcttcttcctaattgccttcagctcaaaataatccttaaaccaaagtggcatacactgccaatgctcttgagtagattgaaggctccaaagtaaaaagtgctgtactgtagtattggatctccaagcatcagcagtgagtcaggtattacaatgctgttttcagtgagtgtgccatccgtctatgaggagaaatgagaggagctagaaaaataaactgacagctagaaaaatactccactgaatcaacaaatagacatttcttgaaacagtaacatgctcaatgtgcaattttgaaaaagtaaactgagcaaggatcatgaaacatgatggtggtgagaatttatacttctcaggtagccaggggaagctaggtttccacagattcctttgtctttcagtccttttgaaaacggagaaaaagcaagagaagagggacggcaccatcaggtagagtggatctcagctagaatgaggggaagtggcccagaatccaacctcctccaaagagctgtgtgacaggcaagtcctatcctttctgcacctctttccttaaatgtaagttgaagcatttggaccagactgtttcaatgatcttctagattgcttttgccaaaacagaactctccattcctgtaagataagtacacaatggctctcagagatctaaaaactggccttggttacctgcaaactttgaggccccaaggcacaaaaataatagctttttttttttatttttttttttaaggttcatgaaagcttcggacacaaaagcttatatggtcttcgtctctataaataaaccagggagtaaagaaaaaccccgctagtttcagtaaagcgttgctattaagcaaagcaaacctatgcaaatatcaagttcttaatgaggagtgtttcctaaggggcctgtcctctggtaccccgcctctcctctgccacagtcatgtgaaggcagacaggcacacactcgcacactagcacgcacttgggagctcagggaacataacactggttagtgagtcggtgtccctctcccatcgattgcaacttttcccctccttccctctcctgcctctccccactttctacatctccgttctcaggaaggctcagggaggatcccccgctgcgtgcactgcgttctgagaggccggggagagactctgggcccgcggtcggggcggagccaaggtcccaacccacattgaacgggcttgaggattacttggagggctcaggatctaggaggagggcccagggcactgggttggggttactctgggaaagctctgtgggaccaggtgggaccttagggctggagatggactctgcgagctgggggcggagttctagactggcaggagcggagttctgggtggcgggggcggggtcgggaccagcagggacggcctctgagagttgggggcggaattctgggccggtgagggctggggcgggaccagcaggggaggcctccgcgagctaggggaggagctctgcattgtctggggcggggcttcgagtagcggtagcgaggtctggagccgcaggcgctgcctccgcgaggtaggggaggagctctgtactgtcaggggcggggctctgagtagcgaggccgggtctgaactatcaggcgcggcctctgcgagctgggggcggggttctgcaccggcgggggcggggttgtgagtggtgggggcggggtctggagcagcaggcgccgcgtttgcgagctaaggtcggagttctgcaccggcgggggcggggctctgcgtggccggggcgggctcggggatccgcggggcgactcccggtctggcttgggcaggctgcccgggccgtggcaggaagccggaagcagccgcggccccagttcgggagacatggcgggcgttaaaggtacatcgcggtccccggctcgcttgtcgtgtggtggggttgccacctccgttccggtcaagcctggggctgcgccttccgcgcgccgttggggaacggcctcaccacccttcccgcctctccggttcgggaggcgatcgaccgctcccttcgtcccttggggtgtgggtggagcggcgtttcgggggagccttggccctttttgcaaggccgctggccttcctgctctccagtggcggcaccagacccctccccagcctgagccctcggcgagagcggcgccctccacctctcctgagtttttaaacaaggtttccacttcttgacgccaccctaacgcctttcttctggttttctgcccctccgcagtttcctatttgccacaaaggaccctttgtctccagcgttcttagcattgggaaacttaatcctctttttcctaatgatttttccaactgggcagagttgaccgcgggcgggtgtcaatggaaagcacccagaaagacggtgtttctcgcagtcgtggagagtagattacgtgtaattttaatactgctttcttcggtgttttctctgtttatggacagagcagaaaccagtgtgtgtgtagtatgtgttttttgcatggggcagttggtaaaaacaccgcgtcccttatctgtatggcttcagagcaatgcgagacggaaaaggttttttgcaaggcttcctgtattttggtaggaaaacattccatttctaatctgtcgaatagagtagcatgacttgtttttatattggcttttatatcatccttgaaatttgcacccaaagatatccccagttaacatctgctataaacatgtagatagtatatatacgagtacgcctctgttcannnnnnnnnnnnnnnnnnnntgccgaaaacagatgaaaagtagtgtctcagtactacacatgatcagaaactaccaaatcatgatcacgtttatgtgtgaatgtgttagaaaattgtgatgtagtgaaaaaaaaggaagtctgaaatggaaacggactaagggaaggaagcattttacagattgttcaacttttattgaggaactactgtatgccagagacttaggatacaaagataaatgagaagttattggtgggtgacagagctggaaataattatattactatgtcagtgtttatgttgggctcagatgcggtgggagaacagatggtgggttggattttgtcctccaaaaagatgtgttcaagctctaattccctggtacctgtgaatgtgatcttatttggaagtagtatctttgcagatataatcaaattaaaatgataactggtttaaggtgggccctaatccaatgactggtgtccttataagaagaggggaatttagacatagagacatacagggagaataccatgggaagacggagacagaaattggagtgatgcagctacaaagtcaggagcaccaaagattgttggcaaccatgctggcaaccactgagtgttaggaagaggcaaggaagggtgcttccctacagccttcagagggagtgtggtggcgctgctgacaccttgatttcagaagtccagcctccagaactgtcagaagataaatttctgttgttctcagccatccagtttgtggtactttgtaacggcagccctaggaagctgatgcaggtgggattgattcccctgctccagagaaaggactgttttcacagaagaggcgatgcttgaactgaatctgaagggatcaatgtggcttcccttggcaaggcatggagtgaaggtggagtatatcccaagtggggaggacagcacgtgacatggcgcagggcttatgaaacaacatgccttcttctcttcaggtacttaagctacattagtaagaccagaacttagtggtgagggttgaagctggctggacaggcagttaggagtgagtcaggcgatggtgagcctccgtgccagaacaacttgtaggctgtggaagcaaccgcaaagggatggcagcggtgatatatatagttgaaagatcactgtctgctgtgtagaggatggattggaagagtcacagaggcaggaataagaggttaagggcctgcaccagggctgtagcagagagtttaagaagtctgggagattgagtcaccttgacctactgattcattggaaggtggaatgcaatcatggtgtcagtcctctaagataggacctttaaagtgtagggatagtggtttggttttacacgtgttacacatgttgaatttgaggttcttgttggcggtcaaggcagagaagtccagactggaggtggaagtacaggcctagttctttaggacctactctgggctggagcatcagttgcggccgggcccttgtggtagtaggagctttgggttgaacataagttttcagcaggagtgcgtggagtgaaaagagagatggggttggatttttggtcaactccaactttaagagattcagaggatgtgattcctgaaaaaagaggaaaaaaaagaccaaaaagaatcaaacagaaagatggttgtgaacgttgagaaactggtatcagaacagaaggaagaggtctgcagtacctagctttgacaggcctcatggaggagggggtactgccgatggtcaggcacagaggagaggagcaaagcctgctgggaaaagatcatctgaatgaaatagtatgtggtatttgctttccatccacacatgggcattttccattaaagagtggaaatgtaaaaagatatgttaaaattgacagtgtttctttgtcccttaacatgtgtatactttcagatgttttttaaaaagcactttggcaccttcctattaaagagtctctctaaatcttctctcaagtaaaaggaagcaatcaaaaatgttcattggcttaattaattagtttaatactaattatgagtattatggacttttttcagaagaaaatttggataagatagtctcctatgcttttgatttctacctttatcaaagaacattgctaaaatgagtagatacctgagtcagtcagcatttatttggctacctccttttgccaagcactttacatagattatctcatttaattcccataagctcaataaggtggcaccattatttccattttacaggtgagaaatcaggttcagaggattagcttctacccaaagtcataagaccagatggtggcagagttaagatttgactcatgtttgtgactcagagctcaagattttgtaacaaccttgatactctgtttctcactcagcagcacaacaagggcaaatacgttcctactcccgcagagactagtgtccaatagatacagggaatacatattttattcagtgcacactagttgggaattgtttcctacaaagacatgaaaacaatcttcaaatacttgcagtactgtggtttggggaggcaaaatgatcaaaggtatatattacagggaggcagttctggatataatttaaagaaggagggctttcaacatttagaagctgttggaattaaatgacttgccttgggaggtagtgagttttccttcactggagttatgtggaccaactggctgccctctggtgacaaatacagagggaattcatccattggataggggttaggtactggaattacttgagacctttgtatactttatgatttttaaggtggcagacatgggtcattgtcttaatcagtttgggctactataagaaatatattttagactgggtggcttaaacaacaaacatttagtttccacagttctgaagactgggaagtccaaaattgtggtgcagtcagatctggtgtctggtgagagccagcttcctggtttgcaggcctgctttctgctctcacattggagaacagagggagagaaacacagagagagtgtgtgctctactttctctcttcttataagggcactcatcccatcgtggagaccccaccctcatgacctcatctgaacctaattatctcccaaaggtccacctcctgatagcatctcacggtgagagggatggagccgggaaggtttcaacatgtgaatttgaaagggacacacataatgcagtctgtaacgggtcaaatgtaacctcaataaaatgagtaaattgctacatttgcttgaatttgggacctttttttctttcttttttattttagtaaatgtttttattgataaatgattcacataccataaaattaacattcttaaagtgtaagatttcatggtttttagtatattcagaaggttatgcagccatcactactatctaattccagaaaatttactcatccgccaaagaaactctggacctattagaagtcactccccatttccccaaaccctctagtgcctgacaacctctactgtgggaactttaacttttggctttatttttcacagctctcgtggcattatccttcagtggggctattggactgacttttcttatgctgggatgtgccttagaggattatgggtaagttatcatttcaaaaagaactattcctctttctgtgtctttgtcactattagtatgggtgttagagagttcggtcaatttagcaccaagttctaaccagtgagttagtggagcccagtttatgaacacagtccctttgtgggtcaggtgtacttttgcagagggctctgttaaaaattgatgtattcattccataagcatttgtttaacacctactctggactagctggggacacacaaatgaagagagagtcctgtcctcaaagaggaggtaaagttctagttgtgagtgagagacaggcaaacggtctagtcagtaatctggcagctgcagtggagatgccagcacagtacgctggagctcggataaagtgcacctgagtttcagtgggacagtcagggaaggctgcatggcagaggttgtatctgagccaagactaggtggatgaataagagtttttcagggtgatgagtcaggggaggacattccaggcagagggaacattctacacattttttcattcaaccattgttggttgaatgcttcccatgtgccagctactgttatgggaactagggattaagacataagaaaacaaaggtcctgc

SEQ ID NO: 872 - DNA, 5760 bp, Homo sapiens
caaaattataaccccgcacaccgacttgcatgcaattatcatagcccgagtgctcctccgttgagagacttcgcccccgagaccgctgactgtgaatgacaaatcaaaagtcagggttgcagaatcagccggactttcctgctcatttgcagcagagggaggaagcagagaatgaaagattctgaaaataaaggtgcctcatctccagacatggagcccagctatgggggaggtctctttgacatggtaaaaggaggtgcagggaggctctttagtaacctaaaggacaacttgaaagacaccctcaaagacacatcttctagagtgatacaatctgtgaccagctacacaaagggagatttagacttcacttatgttacctccagaattattgtgatgtcctttcctctggacaatgttgacataggattcaggaatcaggttgatgacattcgaagctttttggattccagacatcttgaccactacacagtatacaatctgtcacctaagtcttatcgaactgccaagtttcacagccgggtctcagaatgcagttggcccattaggcaggctcccagtctgcacaacctttttgctgtgtgtcggaatatgtataactggctactgcagaatcccaaaaatgtctgtgttgtccactgcttggatggacgggcggcatcatcaattctggttggtgctatgttcattttctgtaatctctactctactcctggcccagccattcgattgctatatgcaaagcgaccaggaattggactttcaccatcccataggagatacctgggctatatgtgtgacctactggcagacaagccctaccgccctcacttcaagcctctcacaattaagtcgatcactgtcagtccaataccctttttcaacaaacagaggaatggatgtcgcccttactgtgatgtactcattggagaaaccaaaatatattcgacttgcacagattttgaacgaatgaaagaatatcgtgtccaagatggaaaaatcttcattcccttgaacatcactgtgcaaggagacgtggttgtttccatgtatcacttgaggtcaaccattgggagccggctacaggctaaggtgaccaacacacagatattccagcttcagtttcacactggattcataccactggacacaacagttttaaagttcaccaagcctgagttagatgcatgtgatgtaccagaaaaatatcctcagctatttcaggtgacactggatgtagaactacagccccatgacaaagtaatagacttaactccaccatgggaacattactgcacaaaagatgtcaatcccagcatcctcttctcttctcaccaggaacatcaagatacgctggccttaggaggacaggctccaatagatatccctccagacaaccccaggcattacggacaaagtggtttctttgcctctctctgttggcaagatcagaaatcggagaagtcattctgtgaggaagaccacgctgccctagtgaatcaggaaagtgagcaatcagatgatgaacttctgacactttccagtccgcatggcaatgccaatggtgacaagcctcatggagtcaagaagcccagcaaaaagcagcaggagccagcagcccctccaccccctgaggatgtggaccttttgggcctggaagggtctgcaatgagtaacagcttctctccgccagcggctcctcccaccaattctgaactactgagtgacctgtttgggggtggaggtgcagctggtcccacccaggctggacagtcaggagtggaagatgtgtttcatcctagtggacctgcgtctacccagtcaacaccacgccgctctgccacctccacctctgcgtctccaaccctaagagtgggagaaggtgccacctttgacccatttggagcaccttctaaaccatcaggtcaggatttgctgggttcttttctgaacacatccagtgcttccagtgacccctttctccagcccacaagaagtccttcgcccacagtacatgcttctagtacgcctgctgtgaacattcagccagatgtttctggaggttgggactggcatgctaaaccaggaggctttggaatgggaagcaagtcagctgccaccagcccaaccggatcctcgcatggtactcccacccatcaaagcaaaccccagactctggatccttttgccgaccttgggacactaggtagttcttcctttgccagcaaacccaccacaccaactggattgggtggaggattcccgcctctcagctcgccacagaaggcgtctccccagcctatgggtggcgggtggcagcagggaggtgcctacaactggcagcagccacagcctaagcctcagcccagcatgccccactcctctccccagaaccgacccaactacaacgtgagcttctcagccatgcctgggggccagaacgaacgtgggaaaggatcaagtaatttggaagggaaacaaaaagcagctgattttgaagacctactctctggtcaaggtttcaatgctcacaaagacaaaaaggggcctcggacaatagctgagatgagaaaggaggaaatggccaaggaaatggatcctgagaaattaaagattctggaatggattgaaggcaaagaaagaaatatcagagcccttctttccacgatgcataccgtactatgggctggggagaccaagtggaaaccagttggcatggcagacctggtaacaccagagcaggtgaagaaggtgtacaggaaggctgtcctggtggtgcacccagataaagctactgggcaaccctatgaacaatacgcaaagatgattttcatggagctcaatgatgcctggtctgaatttgaaaaccaaggccaaaagcccttatattaatttatgagcttttccatctctgctgcagacctgtgctaatgcttagtgtgtgtcacaattctgaggttttcgcagatgaaccaaaaactccagtaacatgttttcagtactaaaccgttaagttactcatgaattaatttctcattgataaggaatgtggatgtttggtttctccaaagttcccaccataaaagatccaaagcatgagaggaacttctagtcagatgaccttgcagaaccaccgcattccaccctgccctttggggagcctactcagcattctacctggggaaatggaaaacagaggccaccacccatgaaggcataacacccatcacattgtctgagaataggattaatgagcaaaagttatgataatagagttatatgatggtttaatggtttctagatttttcttggaaagatataatttgagcagtggctttatgcagactccaagaacaaaaccaccaggtatttttttttaagtaaaaatttactaaggcctttagcataatactgtaaatgtcttttggtcaagagaactaacaaatataaaggaacttgaaatgtggggagtgataatagtccagtgattaaactacagtccagtgattaccaccaactttctgactaagctaaaaatgaatgaaaatggtggctaaagaaaatagggactctgaagatgtcgaaatctttattcctggttaggaaggtgggccgctacccttctttccctttagaaaactgtgattaattaaataaaaagtcttactactataacaactctaaacctggtttaaatgaaacatctaattttgctgtaaggcttaatgctcttcttttgtttagccaagaaaacattcttagttggaaacaggtggtaaagtagtttggcctgttcacaacttatcaggaccaatatctagtgtggactcagtgttctctaggtttgtgagcagttgtggtaagagaatggaaggcaacactgaataggagttaagggaatggcacgatcacagtgagagagctgcactcacctgcagacccagtcagatggcttgtcagtatctgctctgaggaaccaggtcccacctccccacaaggcaaatctagacccattaaattattacagtgggcttttttgttttaaaagtggttggggatccacaggaacgacattcatacagggacatttgtgaaagcaaagcaagaatgaatgctttcccgatctcagactggctggattcagatcagtgtgttggctggttctcattttaaggggtaagcagtttgctattctgtgactttagtagatctcttttgtgtgcacatatacaatgtgcattatacatatatattaaatatatccacaaagcagatgggcaaaaagattttcatgctaatcttcaaaggttcatgctcaatattgtgaaaagcttttaaaagttgttttgaaaagacaatcattttttgtttttgttttaactttcttgtggcaagctataccggaaaagcggcatgtcaaaaatactttaggttctacatagatctctttctctcttttgttttgtttgtttgtttgttaaagttcattatttattttaccttttactgacaatgtgaaactcgaagaaaatgttctctttttaaatatacagtcataaactgttcaaggtaaccataacaaactaggtgttatttattaacgtattataaaataatgtttgatccagtatgtgcttgtcttatttaaaattggaatgtgagacatgttgctgtgacctgtttttctttctcattcacatttgtagatattgtgtgaactacagtatataatgataacaattaaaaggatattctgtggatgtcacgtattttgaaatgatagaactacattagctttgtatcatgtttggataattcatcaatgttcacagtttaaaacatcattaaacattatgtaattacaatgagaaagaatcttacttaaatttggagattttcccccacatctcttttccggatacattataattctggacccctatttatctcaaaactcttaatatatgcagaccaacaggtctttgcattccttttaaataactggttgtgacaaagcttgttgttgatcagattcactgtttcatcatatttattgtaatatattttttgttttgtaaatatgttacaacaaaatgtgattggtctaaaatatttgtaatgtatattaaaaggttcaaaaatatttgtataaatctaagttatttgggtacttgtaggaatacaatgaggagcttgaatgccaccttctgacatgatttacttttaaggaaagttatgaggagagaatacaaaaagcatgcaccaaaatgtaatctgacaggatttctggatttatacgtaatcactcctgccccaacacacacacacacacacacacacacacacacacacacatgcacgcacacatgattttgattatgctacatgatatatgtttcaaaaagaattagcatagaaatcctggtctcctagccaaaaaaatcaaaggattttcaaaaaaacgaatctgtatgttgaggcaaaaggattgaacctggaagtctgggactttatcatagaaacaaagtctcagatattttagttctttggaaacaaatgctgtaattcaaaagcatttgacctgtcactgtactatctacatgtggaagaatgttcaagttgaatcctaatgccgtgaatgaaacacagtctgtgtagggaatgagcaaaaaagttgaattcccattgctttttggcccttttggctaaaataaatgtagcatctaattttatcagttt

SEQ ID NO: 873 - protein, 905 aa, Homo sapiens
MKDSENKGASSPDMEPSYGGGLFDMVKGGAGRLFSNLKDNLKDTLKDTSSRVIQSVTSYTKGDLDFTYVTSRIIVMSFPLDNVDIGFRNQVDDIRSFLDSRHLDHYTVYNLSPKSYRTAKFHSRVSECSWPIRQAPSLHNLFAVCRNMYNWLLQNPKNVCVVHCLDGRAASSILVGAMFIFCNKTPGPAIRLLYAKRPGIGLSPSHRRYLGYMCDLLADKPYRPHFKPLTIKSITVSPIPFFNKQRNGCRPYCDVLIGETKIYSTCTDFERMKEYRVQDGKIFIPLNITVQGDVVVSMYHLRSTIGSRLQAKVTNTQIFQLQFHTGFIPLDTTVLKFTKPELDACDVPEKYPQLFQVTLDVELQPHDKVIDLTPPWEHYCTKDVNPSILFSSHQEHQDTLALGGQAPIDIPPDNPRHYGQSGFFASLCWQDQKSEKSFCEEDHAALVNQESEQSDDELLTLSSPHGNANGDKPHGVKKPSKKQQEPAAPPPPEDVDLLGLEGSAMSNSFSPPAAPPTNSELLSDLFGGGGAAGPTQAGQSGVEDVFHPSGPASTQSTPRRSATSTSDTLRVGEGATFDPFGAPSKPSGQDLLGSFLNTSSASSDPFLQPTRSPSPTVHASSTPAVNIQPDVSGGWDWHAKPGGFGMGSKSAATSPTGSSHGTPTHQSKPQTLDPFADLGTLGSSSFASKPTTPTGLGGGFPPLSSPQKDQPMGGGWQQGGAYNWQQPQPKPQPSMPHSSPQNRPNYNVSFSAMPGGQNERGKGSSNLEGKQKAADFEDLLSGQGFNAHKDKKGPRTIAEMRKEEMAKEMDPEKLKIWIEGKERNIRALLSTMHTVLWAGETKWKPVGMADLVTPEQVKKVYRKAVLVVHPDKATGQPYEQYAKMIFMELNDAWSEFENQGQKPLY

SEQ ID NO: 874 - DNA, 38199 bp, Mus musculus
  misc_feature (1)...(38199): n = A,T,C or G
ctcagtcaaagggacctggataattgctgttgaatgatcattttggaacccagcaggagctgcagcggtaacactagagccctccctactagcagaggaggaatttccagggctgattttaggctgtttgaacactattgtgtttcaaatgaaaaggttttctcattagtttttcccttgtgtagggcaaaacctctgaatgaaatgaccagtttgaatcatcagttcctaacaagtggcagtgtaagccatttgggttttactgttaacaataagaaactaagaaaggcatcacagagaaatgttgctgtgtttctaacttagagttatgcaatccatcgggtcagtgaagatgtttatcagtgtgtactttgacctggtagtggcctttatttcagattatccgtgacccacgtagcaatgtacactgactctctgtataatcctctgctacatgtaccatcgcacaaaacatctcgggcatcaaatattcacagaagaaacggtgtgttcaaatattcaagtatatttaaattttagtcagaaagtcagtgcctcgtctttcttccctcctgctcatttcaacagtgtgtgacttactggcccagtatggcttactgcttcctgtgagctcagcccggcagcagcagaggcttgctccctctgacgacccaccgctatgagctctctacagggcaagcaggacagaaatgcggctgaactgattgaagataataatcatgataccatctccatatcactcaccttatgagttagtaaaagtgtggatatcattttttgtaactggtgatttttataaatgtccttgccttcatagtccttccagtcacccatctcacaaaatcttgaatatgcaattattcttcatgacacattactgcaaatagggttcccatttgaaaatgcagtttaatgtaagttgttattgaattgtgatttttttttcctggaaaataaatggaaaaaatatgaaaataaaccaagctgtgaaccttttatttcctgcaccttaaatttttacctacatttctggaaaatgtaatttcataattaaggaaaagatggtaggcccaaggtctagcaaaggcaagagctttcaagtgagaggaattcaattccatgcttagagacccaagcatgttacatcatagttgtaaatatcctcataaaaataaaataatataaaataaaatataaaataaaatgaatagcggggtgtggtgctagagagacggcttagctctagctaagagaagagcactagctgattttccaaaggacccaggttcaactctcaggacctacatggcagctcacaactgtctgtaattccagttcctggggatctgacaccctcacagaaacattcacgtaggcagaaaaccaacgtgtgtaaaataaaaataaatcataaaaatgttttaaaaatgaataacgggttttctacaacaacaggtctttaggtttaaatgaggtagcagctattggtcactgagcagatatcaacctagttggtagtagtcagtgggcaattctttcctgctcttatctttgtgtaaacagggctagggactggctttagagcccttaacaccttgctggagtcccgatgctaattaccgtcctagctccggcggaccaagagaacatttgtcaagcatcctgctgtattctgtgggcggcgtcctgtcttcgttcctaaataccttcaccacagcgcttctgcagcttcagtagtctggggtcctccgagggcttgaaggagcgcagcctgcttctgtaaccagcagagttttaaatcctgtgctcctaggtgcgtcctttaacgttctagttctcggtgagctacttctataaaatcattttgtgacagagttttgtggcaactgaacggctgcacagcatctgttagcagcgggggggggggtgaagagtgggggggnnnnnnnnnnnnnnnnnnnnnnnnnnnnnnnnnnnnnnnnnnnnnnnnnnnnnnnnnnnnnnnnnnnnnnnnnnnnnnnnnnnnnnnnnnnntcaggtctgttcaggtctgggttgtcctagaaaatttgcacgtttcccactggcatccctgacgtcctcagggggagaaacatgatacagggctctgggggcacatgttcacagtcagacctggcaaccgtacaaggcagcaggactgggaaggctccagaagacagagatggtgggattcctaagatggctcggaggcccatcgtgcaggggaggggcggccctggcagtgtttgaggaggtcaccctggagacgccctaggtgcccacagggactgctcgaccaagcgatgccggaggcagcaaccggtcttctgcagctctgctgaggacgatcccaggtcctggtggtccgacctgccacccagtgcagagcaggtatgtgcaggctcttggggacaaagcgtccaggaaaggaggctggggaggaaacagcctatgtgggggaaaaggcgatctcttcatccagcccaagaaaaccagaaaaagtggtcccaagtttggtcttcaaagcgcggtgagctcatctcatctgcaaatgctggtcgccaaaggtctttgctacttccctgcacttctggggacctctgaattcccatctgggttctctctagggagaactagtctgaaagccgagttgggacccgctaattttcgcgaactgacaagcatgggaggtacccttacgttaggaatggagcgcttagttcttctggaagggaagactcagtagaggcacgctttactattgagtaaactactcaattgagtagccgactattgagtaaagcaaggtgaatattccaaagagacaagcacaggttgtgaaggggtccggagggcgcaaagggctcctcctagaggaattcaaagtttatgaatatttatgagatagatagcatattcatggcgttaggtgataggttttttgtttttgttttttctcccaacttataataaacctgacctcccttttagggaatttcttcctatgatttctagaaagagccccaaagaaggtcaaaatcacaaaacaaggccatggtcttaaagtgggtacacacttcgatattgtgcatgtgtaagtcgataagctgatgctttcacttagcgctctgactatcaggagactccactatcataatacagctgtcgttctcttgggtaatagacctctggttcccccttaaggctgttttagtgccacaattgacctcatagctctgttccttgcaattttttttttaaactgaagtttcacgatgaaagatggggccaggttttccaagactggtagtctccacaaataggaagcaggcccagctctctgaggaactgggaactcccagtgccacctctccagactgtctactgtatccaagcacaaacgctcccaccacgttgcctccaacaccacgacagcaaatattaactagcgagcttataacaagattagattcagagaaaaataaaaatgttggcttgcagcgcaggacagcatctttctatagttgcccatctttccagcgtgactttctcccactccatcagttaagcatttgggctacaaattagtctccttgtgtgaatgatatacactactgaatagaaattgtcctatttccagttgtactggcacaacaaaataattacttacactacacattattgctctccgggaaatctcaggacccccttcgaaagggtcatacaagcagcggggtcctccgcctaggatgaaatctaactacaaaaactaaaaggttttcatatttttccccttttttgcagcatcagtttttcctatagtctgtgacaatgtcagcattggctaaagagaaactgtttcttgcaatgaagaaaagggggagcatgtgttccccaaataatcgtgagttccgacagaaggaaggtcactggcgcatcaaacagtgagtacctggatgtctagcatgttcaactgtgagcaatgtttaccaagagccaaaaacattttcctaggaatggaacaaggtagaaactggcaaatacggggctccactggtccttggagccataattaagatgaaagaggaggcttacattgatgcttagagcatgtttggtgctttcaaaactacctctcaccatgtaaaaaacaaaagcaaaatacaaacatctgtactgcagaccagccaccctcacaagccccttaaattcttctcaatattatgaaactgcatagttgtatagtttgtaatcatcatcactgatttaatacaaattttgtactatattttcagtctttatttatatcctcttaaatggctatataatattttatgaatgtgtagccaggatcagtttatcatccccacatgattggacattttcaatttgtcgtcttcttctttttcttcttcttcttcttcttcttcttcttcttcttcttcttcttcttcttcttcttcttcttcttcttcttcttcttcttcttctcactgttttgctttgcaaaacagaccaaggttgattacagttgtggaagacaaatctttttattatcaaagtgcttcagctggcgcccatgctcatttacaatttgaccaagccagctcagtcagtcaacatgttctccaggaagggagggaggattaaaaagaaaagagacaattacacaacactgtagcatgaccccatccagttctgaggctgaagcgggtttacttttttccagtatgcttttatatcattctaggtacatacgaagaatatggtcagtcctaaggcataaacagaggtgttaaaggaacaaacaaagcacagacagggtaggtaaggaacaaacaaagcatagatggaaggtcccaagattactgtcgtcagggtcttaacaagacccatcaagatacaaagaacacattcctcagctgtattcatcctgagcctacttccaagtcctagcccaaagtcagattcctgccaagtttctagaagaggccccaaaagcgctccacagcagttccactttcagtcctacaagtttgtagactgctaacacagtcttgtttttatttttattttttttacatggttggaaaactgagtataccagaacagaaacccactgcaggtcagaggaaggatgctacagctacagtaattaattcctgcttctgagcctcagcaattctggctgttccttcttaaaccactacaagtgttctcccatgcactctctctgtcttttgaggttggggcattggtgagtaaacccagagcctctggcacattctaccactgagcgacaccccagccctccttctgtgtttacctcatggctgctaacttgcccagactggacttgggctctctttgttcttccaaaccacggtagagaatcatctgaaatcagggtgtggtcaaatttaaagaactaactttgtatctgtgcaggaagggagagctcttatgtcatgcacagcacgtgtgtgacggccaaaggtcagctttcaggatgtggtctcacttccatcatgaggattaggggatcagatcgtgccaggtcatgagacttgtcagtacctgtctttaaccgctgagccatctcatagctctagtttgtccccagcaaaccacgattcttacagtattggtgattctctttcatgtgcgtcttcaactggtaggaaagttatgaaatattagtggctctctggtggagatgtgatttgacattgacaatgtgtctggagatgatacatctttttcttgaaaattaattgaaagcacctttttcaaaaactaatgtcagcattataagtcatctcctgaaggacactcaagacctgaacatcatctcgtttaccacccccctccccaccacacacatatacacacatacacacatacacacacacacacacatacacacacacacacacacacatcctgctaggtcctttcgttctttctgttttactgtggaatagctgagtctttcaggtcaagtaacttgttacaatggcaaacatccagtcccaaattcagagagaggctccagggaccccaggcgctgccccatcctccccactcctgtgggcatgctgccctctgtctggccgtaccgtgctctccctcagtgttctgtctggccccagccactgttggaaccctactccttgtatgaaaggttcccctgtcttctgctttccttccttctccctcctacctcttcaggaagctcagttcctatccttgaccacacccatctgtaacctgaggagccacttttctgtctgtctgtctgctcctccttttcttcacaggcctgtgtgtggtgggtttggtggtggtagtggtgaaggtactgctgctgttgtagctgctgttgttttgctttgctttgctttttgttgtttcattttgttttgtttttaaatctggctccctcaatacactgcaaactcacttgtctttgtagcagtagacacagtgagaaggaaagaaaagaagaaagagtgcgggtagatctaccggggatgtggtcaacgtggatttgttctttcgtcttgatttttatgtcttcagttctctgaattgtgactgatgtctaactgtcatcctgataaatgtgtgaacgcctcctgtgtcatgagaggaagactgagtgtgtattcagcgttgccactgtcatctgttttcagaattggatcttgtttgttcaagttataatttataatatatttttaatgttttctgaaagaaaaaggaagcatctctttaaggctgtatttttgctgctcagactggtcataaagtcgttagttattttgtgtagcttggatcaagaaggaccccactgtacccagcagcaaaataaaacctcttaagctaggcccccttatcctaagacacacatctgggtacatgactttccactctctgtttttatctaccccactgggaaatctgaacttgacttttcacctaaacaatttattagaagagaggtggtaacattcgctgaggttttagcatcagtctcagctctgcttccaggaagtttccaataacagggtctggcaagccatgaccaagcaccaagtctagtctggaacacggatggctatggtttcccagctaggagcggttatttcatagctgaaaacaaaatttaaaagagtacagttttgtggcatgcaaatattgatagaaatccaaatttcactgtccataaattatggattgtagagcatggcctgcctgctcaatgcagtgtctccagcggctttgcgatcgcagcagcagcagcgtctacccacagcagcaacagaaagcatagggcaggcaaaccccaaagtcccactcttggacctcttccagaaatgttggtcaacatcttctctactaaacaggtgcaggcatcatccccatttccaaataaagaaacagcagctcaagcaggttgagatgttaaaaccaccaagatagcaaatagaaagaagtcttttattacctgcatattttcattgcacagaaagtggcaaatccgtgtgtaatttgcacatggctcccttgttcactgagatcttgtgtttttcacgcatgagtccaggcaggcattcatgctgatggtttacttgctggaacctcaccctcaggtagacattgaacagcatttgcacagatgctgtcatcactggtccttaaaatggaaacagaaggcacaaggttgagtcactttctccagctaatgcggcaagctatctggacatattagctccaaagctagcagctctactgtgggtttgggcaaagaacaaagactaaacggtctttcttttgcctcaaagcaaagttctcacgatgccacagaacaaaaaccatgtgtggaccccaccattccccacagaactgtattgaaggcacccagcacagcaggtcagccacactatgttgacttccctgtgttatttactcaagatccagggagcctctagtacccgtcagctactgtgtcacgtattaggcgtgcagaataccagaggggtctagcgtagagatcactgctgttccagcaaactgagagctacttgggaactccttcacagtccactgggtatttcagcgaatgatggaaaatgcaaccctcgtgaactttgtgcaaacctgcaaacctgctcaggtaaacaagcagggccaagtaaattgacatggactaatttattccaggattccaagccatgagcctgtgcatcagaaattaggttgggctatcctttctttggatccctgatgggaaaggctaggagacagaataccaaagggatagcatgtgttatactgaagtttgcatcgagctgaaatgcagcgtagtcccagaaagagagagagacagagagacagagacagagagacagagagagtgagagagagacttggagaagataaaatgtcactttccaagtgaaaccacaggaaaatgtgacagcctcgatgtgcttctcagacaaaatatatatattgaatagaggaaattctattttacctaaagttatttccataaatggggaaatgatgggggtttttgtttttgtttgttgtttgttgtttgtttgtttgtttaagacaagctagcttgtaactcaatatgttgatcagactggcctggaattttcagtaatcctcacaactgcccccttagctctgagaaaagagccactatagccttggatttttgagggcttttagttcttgtgtctgacagatggttttagagaggaagcaggtctggtacctggtaccatttacacaggcatagtccagaaggaaggcagagaatgggaagctggaaagcgtaaagcaggtagaaaaaagcataggagagcctgtctggactgcgagtaaggaagccccgcccccacgcactacagaccaccagcactgctgccaccgccccatcctctccttgaatcttgaatccatacgcctccacctcagcctcccaagcgttggggtcgtaattacacactacgaatcccaacacgaaaacataaaccacaaaagaaaactaaaacttttttggtaagtagaacatcaacaaaatgaagtattttcacaacgtatataataatatagttagagaactgctagaatatctatccacaggtatagcgttgcatgttaacaataaaaggggaagccagttttaaatagagtcagaggagatggcagtgcccacaaggggagtctaaaggccaagcagagtaagaagagctacacaagcacactggaaaaccagagatgcgtaacttagagcaaggtgtcttctacacccgtgctgatagcaaaatgctggcagacagaatagcaaacattgctgagggcagtgagaataaaaatagatccagctgtttagtgcacacatcatctggacattaataatatataaataaataaaataaaaataaaacattaagttctgtagaggcagacagcttaattcctttcatatctcctagtatgacatctcaaagacagaacagcacctgcgcacaaaactgtccttcatggactattttgatcagtgagtgagcagttattattgcattatgtgaattcttaagtaattaagtcttttttgctctaaaataaattctgcttacaagtccattatatagtaagtccggagtgacttgtaagatgaatttacaacctaggaaaagtgtttattcaagtgtttggtacaaagcaagctttattttagctttcttattgaaaaagtccatttgcatctattccaaaaacgaaaggaagggagaagaaggaaggaagaacaaggaggagagtaagggtttcctctgcactggaaatatggcagggctggccacacccctcgttaatgacgtcacagtcatgtgacatagccaggcctcaaacacatccagcatcacctctcctgattgcagtgtggctttgaaaccatgcctccttcaggccctgcaggagatgtctatcgtctggccttgaccatcagttccgttcctctcagatgaacagtagcccaccacgtcaagagctggccctgcgcttttacccacacctatgattgttctgccagtctcctgtgctaggttttacatctgtcagtccagggcttgactgttcatgggaggtaggtatattctgtgtccttcgaaaaacacccttactcttggggaaaaaaaaaaagcttcccacaagacgataccttctactgttttctcatttctttaatttgtgaaggttttcaacttctgtttccactatagccttctaaaaagataggccaattgggataagatatcatgaaactgcatgacttccacaaagacgcaccatttactgctaggaaatgagctggcatgctttaggttttaaacataatcagaaggggaaaaaaaatccatagatagtcttagtccccagttaagcaagtctctgtatattgtatctttctctatatatcatattccaggagcatatttaattttaaatgcatcttttgtgtgaccatcactctggactctgacacatcataggccataaatttttgtttaaaagcttttttaaaaattaaaaaaaaacaaaaacaaaaaaacccacagaacctatagccttcttttctctgtgcactgcaatgtctatctatccactagagggcagcacatgactttaatgacgcgcttccccatccttcctgaaggccctcttatggacatgggtggccaccagttacaaagcccaggaatttatgtttgttctcaacagtaactcttatttcaagaaacctgaatacaattctgtcctcaaaagtagctcatgtacttccaagcacagcctggatttttacatgaaactatacatattttgattttaaaatacctttatataagatatacttctcttttctcttttcccctactgtgaatgtgtttgttgaatgcttacaccagtttttagatcagattctcagcacatgcctgatgccagtacttgaggaacaaaggtggggaggatcacagagagttggaggccagcctcgtctaccgagcaaaccccaagccagtcagcactgcacagcaagacactgtctcaattaattaagataagattgactgcagcattctctaggcaatgagactaggtgtcggaaaggattagctcggcaggttggatcacagaactggacttcatccacttgtagtgttgggacatgtagccaatatgtttattgtatttatgcctgcagttgaaagcttaaatgcatttaataagcagatcacgtgcttgtctttagcaatacaaatgcctcgagcctctttgtgtaagccagtgttctggacttcattgataagcccatgcttttaaaatataggaactcctcaatttctaaaaactgtaccaaggggctagagggataactcagtgcaagaaacactggctgctctttcaaagaaccagggtttgcttcccagcacctataaggcagctcacagccccaagtgatctgacaccctcttctggcctctgtgggcaccaagagttcgcatgactcacacagacatacctgtagactaaagatccagctaccaaaaataaaaataacacagaaaataaaagtaaaaggaaaatataactagcccatattatacttccatgtttcttgctcatgctgcaaccactgttaatacctcttaagtcacccatcactcaagtgaggaatatattttaaattttctgtattctctttcttttcttttttttttctgggtttctctgcatagccctggctgtcctggaactcactctgtagaccagactggccttgaactcaaaaatcctcctgcctctgcctcccaagtgctaggattaaaggcatgtgccaccactgcctggctccatattctcttccagctctccatgtccagtctctcacatgctaacctataactatcagaccttggctctttaggatgagtaaggggcttgcttagcctcagggaagccctacctcctatccttgagttatttccttttctgttgctgtgctaaaacaccttgatcttatagaagggcaggtttatctgagtttgtggttccagaggggtaactatccatcatggcacagacacatgggagcaagcagcaggcacagcggctggagcagggtgctgaaagcttacgtcatggagcacaggcacagagcagagagaacaacgtgtgagtatggccttagctctcaaagtcccatcagcagtgacaggcctcctccaccaaaggccagacctcctcaacctccccctaacactgccaccagctgggggccagaggttcgaatgcctctgagcaacattctcattcaacacactacagtcttcaatctggaaaagaaacaaacataaacacgaagctcaaaagtaaaaaagaatcaggctggagaaatggagcacgcactggtctgccagaagagccaaactcagttcccagcacccacatcagctcacagccaccttccactgccgttttagtgggacccaatgtctccggcttccatggtcacctgaggacatgcacacacacatacatacatacacaaacaccactttaaaaattataaagttaaactttaaaaaaaaaaagcttcctgaagttgtagtccactggagacatggtcagccttgaaaaggcaaaaagaaagcaagaggttacccaggcattttcctctctgtgatcaaggcagccaggcttctagtaaagcagcaagggtcttcgctaggcctcatctcccccaacaaaactgacagcaagctcccttcacacagctgaccccactgatcttctagtggagtctgtttcaacagtgtctatcagtaacatctaatgttcctggtaataccattttaaaacaaatacaaaacagtctcctaagccaaatggaatttttttcctacataaaagaagggcagttcagagacctaggccactgctgttcttatccagtctaggaatcaagcagcctctgggatcctgccctcctccgtcactcattttagtcatggaggaaactgaagaccagctcctactggttaacttacgtttgtcggtttggggttttcttgtgttgttttgttctgagaaatcgttctcaaattcctacccagtcagtgctggctgcatcacactggtttgtaagccacagaacttcagctgcacaaaaagggaccaagaatttgccgttcttttagtcagaaatgttcccaccatttagggctctgttaccaagaaaggagatgagcaacactggaaagaaactgacaatgcctaccacatgttaattcaaagttccctgataatagtgacatactgggagcaatttaaatggtctggagaagaaatggttaagggaaatgcaaaatgtttgtatattaagctaatattttaactctgactaagatgcagtgtcaagcaaaataggattatgaatgtaaaatcaaatatctgaaaaccttcttttaatactaacagtcattacctaagcactctggttagtaaggtaattttactctgcacctttccatgtgttttgcatgttttacaaagagcatacagtatttacatgattaccgtgcaaagaaaaagacactagaggcttgggagaagcccagcaggtaaagcccttgctacacaagtgtaagaactggggtaagccagatggatgtgagaactaccttgtaacaccaggggaccggcagggaaagcaaagaagagggacgcccagaacaagctggctagccagcctggatgactcaggaggcttcagcaaggtggagaggatcaagaatgacagctgacatcaacctctggcttctacatgcatctgcatgcacacacccacacacaaacacacgcttatacctacacatttatacactcacacattcaaatacacacttatgcacacacacatacgcctatacatatacacagttacacactcacaaatacatacagatgcaaaacaagactccgagaaaccatctttaacaattcaaaaacagaccagcctctaaaacttctaatctatacgtcagacttcaacccctggtttttgaaagttccccagtagacgtcattttcataccaataatagcacagggtgcactggctagtagactttaatgaccctaagaacagtagcaagagtggttgttccctttgtattttaaagccagctgatatgaactgtgcatcaactctgtttcctgtgaattttcagtatgataccagaagacagcaaaggcttacgccaatgcctcgtgcatgctgcacactgcacacacgtatatctgaatcgcagccacaacttccactagtcattgcccccttcttattctgtctgctgtaagcacacattaagcttttctactgccagatagatgaaatatttgaaatcaaagacagccttccctacaggtgtgacagtaagtccttggcctcgtttcttcttctctctaaaatggagagaatgatgacttctttacagcatcaaaggacgttgaaaagatcaaataaaacagctgagaggaggtattttgagatgcacatgagtaacgctaggtacatagactcgtcacagagtcacaagcttctgcacacgtgtggtcgggtttcataggcagaagccgactatcatctctggtgctgcccacaacacctgtagccacaatggcctaactggttggctgctacttcaaacacagcaggaaactgagaaaagcaggtgttagaaggaagagggtggaatcacccccacaaagatgcatcctgacaaaggcagccagaatggtaccatgctcttggatattgtgagtgaactggaatttgtccccaaaactatattttactaaaggacttttaaaaatagaggaatgtgatttttctcaaagtgtcaggttgcagatcccactaatgtcaaacatctgcaaactaaatattttaaacttctcacagacagaaaaagaaagaaaaaccctaatgactaaaaacaagtaagctggccacggtgtacgcctttaaccctgaccctcagaaggcagaggcaggtgacctctgtgacctatatagcctggtctaactctttcttattaaattagagaaaaaagatagcctttacttggagaaatggtcactctgaatacacattcacacccataaatacaaatacacacacacacacacacacacacacagagagagagagagagagagagagagagagagagagagagcattgcctttgaaatggcatctatcttaacctccatcttcacagatggagggaatttggggtagaatgttgtagctcactagtcccacttggttttcgctgagctgggttgaattacacacagagcccatcaggggctcctccttgcttgggtttctggttccacacctggatcagatcagattgccctgaagaccaatccttttcaatgctaagaaaaaggtggcccgcactgattgacttcttagagtttaggtgacttgcggtttctctcaccgtgtagagaggtgagtgtctcatttctttttttattctgaagggatttggtggaacttcccatgatgatctttttataataccctttgtctgtatggatttgtttcccaacacactaagctcctttatacacccccaagccccatttgtgagctttgtttactgtgggggatgcttttgtgtctttgttaggggactccattgacaatggcttttgaaacactcactgcactatcccatagactcaggttagcacctgctctgacttccacatgaccctgagactctgctagtaacttctctacagctcagtagtcccatctctaaagtgtttcaggctttaaataagccattgggccacttatagggttcattagaaacttccttacagtagatttttcatgtataaatgcacttgcttaaagcaatgttttgtagatcttgtggctaatcactaatgtttactccttcggtcttagttccctcagtaccgtgtcccacgcggatgagcccagccagcgtgatgaatcctctcgcctcacagtccggatggaaaacacctaccagttaggtgcgctgctttgtcattcatccacatgctcaaaaccttgacttcagtgaccaatgtgggcttagctgtagcctgtcattgtctccagtcctagacaagggaccttaatttgagaaagaaagtgggaggccaattacagagttacagtgttgctttgaaaacaaaaaacaaaaacaatgaagcaatacttacttcctttaaaacaaaacaagtcagggctacctaaatctcaaatgaatctctggataccacaaaggtgtataatatgggattgaattcaggttcactgggtatttcttggtgaagttactgtgtgtgtgtgtgtgtgtgtgtgtgtgtgtgtgtgtgtgtgtgtaaaaaaagtgacatgcacggatgtttatccttcaaaaccaaccaaggttgttgatagtgtaggaaaaaaaaaaaaaaaaaaaaaaaaaaaaaccctcactgcagaggcagcccactgcagtcccctgttgacagtgctgtttatctactgccattgaggtttggggtctctgaaaacaaagggtttcacacctgccctcatgctcccaggtggagtccacttcaaattccttttcccactcctgtttctttacaggcctacttgttttctttaagtgcgtacctgcctatgattatctgaattcagatataattgctgccctacataaattccaccgaggcttaccaagaagcaagaagggactctgtgggccagggtaattccacctgtggcctgttaaaacccaagaaaattataaacctaggccttgtagccagttttctgcagcgatcccaataccatttgagtaagaaacatagcgtccctctctgtcttctcgtggacagccctcggacgtcattctgagaagttgtaattacttagataaaggaggacaaacacactgtaactctagatgtgttttcgtgatgtgcatattattgtggcggttgactgacacactcaatccaatactacgggctccaggttaggctgctagcatttcgcactgctgtgaggcagacagtaaaggtccctcccatccattttgctttaattgtgtacctaagtctggtggctgctcttagcttctccagtcagcagcctgaatttgggtcaagttttctccaatttgcagtttgtttgtttgtttgtttttgagactgggtttctttgtgtagtcctgactgtcctggaactagctctatagaccaggctggcctcaaactcagagatccacatctctgtctcctgaatgttgggattaaagggatgggctacccctgtctggcttatcaatcaaaggctcttagtcattggcagcccatgcctttgagtcaagtgctaggaagaaagacctggaatccaatagcattaagataaagcagtttaaatgggaatccctgtgtttctttcatagttttcccccacaattacttcaagcaaataaactaattctacgtttcagaagtgctgatctttgcataaaggcgattggctgactgtcaccctcactccccactctcctggccagtactacatcaagttgatataagacaatctttactaaaggctcatcagtacctttcacaaggcaaataaaccgaagggcaagtagaattggaaatacagtttagttattaatagggctgattggctgctttcaaaagcagactcaatctagcacaaagaccttttattattaagactggagaggtggttctgtggttaagagctcaccaccactgcaccatctaaacccaacttatgtgtgcttatccttttatctaaaggattacagctaccgtaaataaagggacacatgaatatagttcatgagggaaattagaaaagggaagctgtgtttcttagaataaagcaccacttgacccttgctcactaagcacagagaggagagaatgggagaccatagcagcagcctatgacagctgctctgtctgaacgtggatgctagtttagatgtctcccaggaaggtgatatttaagcaaagcatcctgaaatcatggctttctttgtgtgtaaagaacacaaggtctacaagtcgaagggatgttctgagagccggtgaggcggtttacgttagttgcttctcattccctggaactgctgctgagagggacagactagagccttcccacagatcactaacatttcttgttttatccaacgtgacttccataaataatagagtaagttttgcactggactttatttctagagctcaggttaaatttaggtagtgggtttttttttgttttttttttttttaagatggtgactatgaacatcacactagtgaagagtttcaatcagattcttttcttttttttttctttttttgtaaagatttattttatgtatctgagtacactgtcactgccttcagacataccagaagaaggcatcagatcccgatacagatggttgtgagccaccatgtggttggtggaaattgaactcaggacctttggaagagcagtcagtgttcttaaccgctgagccatctctccagccccagtttttcttgttatactatgacaaaatagcatacagaacaatgtaggaaggaaggaaggaaggaaggaaggaaggaaggaaggaaggaaggaaggatttctttcggctcacagtttgagggtgccctccatcatgataaggaaggcctggcaggagatggctgttggttcatatctgggcagatcgattagaaaagatagacaaaagtgttccctttttattcagtctgagactgtagccactaggatggtctaaccacttaaaataatgtcctctccttaaatcatagcacaaaataacctaaaataattctttcacatctttgttttggtctcagacggcttctgctggcctcgaattcactacattgccaaggacagcctgaagtgctgaccctctagcctgcagctcccaactgtgggatgccaggcctgacttagggtaattcttgttatccaagttaggggaaaccatggcacagacagtttactgctttcactaggttttgttttgatttttaagtttttgttcttgtttttcagatcttttgaaatccataacattttcttccttgggagggggcagggggggatatctcaaaatgaaggggacaaggtttgttgattgcatagttgtcactgaacttcaggagcctgccttgcctctgcctctttgagtgtccacatctgagtctgagcaaggtgacaggtgattctggctgtgtaaggaaaaggccctaggatgtgtggagtgaggcttcagtgctatatagaaaaatagttttagagatagaatcacatttgtgagacaaaaggggatgtagtgtttgaaagatgttggtacagcagaccatggcagtactgggaaccaggctccccctatcctggatgctctttctgtccctaaggtataccaactttcttctcctgctgtggccttccttccaaccccggagcaacttggcctctggcagttcccaggggttataaaccacagcttttgccataaggaagaggctgacttggtttttttgtttttttttaatccacttctactttgtaataaagctttaaagacagttcttttttggcctgtctagagctgtgccacccctgagccaatcacctgtgctctgcacttgggctcctgagtggcagtggtaaatggtccagtgttccatgactacaagagggagagaagctattccagcttggcagatgctgctcccatgggtgggaggggacaggaagcacggcactaaccaatagatcttcactagaagaattacccactttctgaatgtaataataaggacaggtactttaatgtaaggcaaaacagagtccccggggaatgatattggccaagtaaggtcatgtgatgtgagtgcttggtaagatagggtgtctatctgaatgacataatccatttaatttagtccacgatagtggcataatcttttttttttttttttggatattttatttacttaaatttcaaatgctatccccttccctggtttcccctctgcaagccccctatcccatcaccccttaccctgcttctatgaaggtgctccctgacccacctacccactcctgcctcaccactctagcattcctctatactggggcatcaagccttcacagggcctcccctcccattgatgccagataaggcccttcagctccttcagtccttcccctaacttctccattgggatccctgtgctcagtccaatggttggctgcaagcatctgcatctgtattggtcaggatctagcagagcctttcagcagacagctgtatcaggttcctgtcagcaagcacttcttggcatcagcaatagtgtctgggtttggtgtctgcatgtggggtggatccccaggtgaggcagcctctggatgacctttccttcagtttctgtttcactctttgtccctgtaattcccttagacaggagcaattctgggttaaaaatttggagatgggagggtggccccatccctcaactggggggccatgcctaacctctggatatgttctccctcccctttgtggggtatttcagctaatgtcatccctgtagggtcctgggaggctcttgctttcctggcatatggaactttctggttactaccccaaattctgcattgctacacacctctgttcagtttcctgaccctctacatctcctccatctcctctcatacctgattcttccctcctttttctgcccactctatactcttcctcccaagtccctctcatcctctacttcccttgattattttgttcccccttctaagtaggactgaagcatccactctttgatcttccttcctcttgagcttcatgtggtctgtgagttcaatagtgggtattttacgctatttgcctaatttccacttaacagtgattacataccatgggtgttcttttgtgaataagttacctcactcaggatgatatttgcctgcgaatgttatgaagttgttgtttttaatagctgagtagtattccattgtttaaatgtaccacattttctgtatccattcctctgttgagggacatctgggttgtttccagcttctggctattataaataaggctgctatgaacatagtggagcatgtgtccttcttaccagttggggcatcttctggatatatgcccaggagaggtattgcaggatcctctggtagtactatgtccagttttctgaggaacctccagactgatttccagagtggttgtaccagcttgaaatcccaccagcaatggaggagtgttcctctttctccaaattcttgacagcacctgctgttatctaagtttttttattttagccattctgactggtgtgaggtggaatcttggggttgtttgagttactctagtgtctgtctttgtcactgaggtgggtgtcatgtatgcagcaaacgttaggtcctgtggggggaattgagtccattgatattaagagatattaagaaaatttaattgttggttcctgttatttgtgttgttagaggtggaattgtgtttacgtggctaccttctttttggtttgttaaaagaagattattttcttgctttttctagggtgtagcttccttccttgtgttggcattttccatttattatcctttgaagtgctggatttgtggaaagatattgtgtaaatttggttttgtcatggaatatcttggtttctccatctatggtaattgagagttttgctgggtatagtagcctggactggcattagtgttctcctatggtctgtatgacatctgcccaggatcttctggctttcatagtctctggtgaaaagtctggtgtaattctaataggtctgcctttatatgttacttgaccttttccccttactgcttttaatattctctctttgttttgtgcatttggtgttttgattattaagtgatgggaggaatttcttttttagtccagtctatttggagttctgtaggcttcttgtatgttcatgggcatctctttctttaggttagggaagttttcttctataattttgttgaagatatttactggccctttaagttgggaatctctgctcatttctgtaccttaggtttggttttctcatagtgtcctgaatttcctggatgttttgtgttagctttttgcattttgctttttctttggctgttgtgtcaatgttttctattatatcttctgcacctgagattccctcttctatctcttgtattctgttggtaatgcttgcatctatgactcctaatctctttcctaggttttctatctccagggttgtctccctttgtgatttttttattgtttctatttccatttttagattatggatggttttgttcaattccttcacctgtttggttgtgttttcctgtaaatctttaagaggtttttgtgttttctctttaagggcttctccctgtttacctgtgttctcctgtatttctttaagggagttatgtatgtccttcttaaattcctctatcatcattatgagatatgatttttaaatcagagtcttgcttttctggtgtgttgggggcattcagggcttgctctggtaggaaaactaggttctgatgatgccaagtagccttggtttctattgtttatgttcttttccttggctcttgtcatctggttatctctggttttagttggttttgctgtctctgagtgtggcttgtcccttcctataagcctatgtgtcagcactcctgggagaccagtttcccctgggaggaatttgggtatggagagttgtggcacagggtcagctcaggggtgcagatggaaacctgaaggatcctgtctccagtcattccttggttcctgtatcctgagggctctgggtgggcccttcttgggccaggaatttgagcagaaatggtgggtttactggtgctcccaagtgtgtcagcactcttgggaggccagctgtctctcagtgggacttgggtgtagagaactgttacacaggtcagctccaggcctcatcagatcatggcataatcttttaatattttcaatacaaaggagaaagtcaccttcatctgtgacattttacaataggagtacagtgggaatcttttgaaaagtacatttattagttctctgagcatttcatcatgcactgtattgcaaaccccaactccttcccctaacctcttcctagatccaccccaccccaaaccccaataatccattgattgtaatacgtgttgtctgtgtattcctgtgtgtgggaccatctagaaggagcatggtggacaagccaaggcttgttcctcccccagaagccatcagctatccacagctacccaggtaaagataggagcacagtgggtatcttatacaaaatgcacacagagaccggagggcacccaagcttgctgtagaggaatttgtctctgacaccgtatctctggttcctgggatcaggagcaggcccagccattctcagattggtaactgcttgagatttctgctgagcagatgttagctgttagagtgattcctatcatgtttcctttacttggtaccgacctgattttcttttttttttttcaaagtcactcagcccaggctggtctcatagtgactatgtgtcctaggctggccttaaacctccacagtacttacattaaaagcatacacctccatgtctgacttcctagcctgatttaaattggactaaatcattcttatatcatctaaataaaaattctcttaatgagtctcaggaggctgacctcactggattgcagtcatacactgtaacccactcttgagtaaagccaatgaaacttcagcaaaaatgaaaggagtgtaaggcctgggggatttaccgccatggaaccctgccatggcctcatctcagactggttgcatctttcaggcaagggacagagcgctcttaagggagccatttccattcagccacggtgggatctagtccaagctcccttcccggattgctcaggcctagggtggcaggcttctactggtggaaggggacaaccctaccgcttgtaagttccttttctctctcagacctccccaaaggaacttcattaaatcctcttattataatctattagtgtttattcataatgcctatatcaggcagaggctaaggaagcaaggtacaccatcgttaggacaattctaatagataatgttaactactaaaagagaattggatagcattcttgattcctctgtagtaactcagagattacccagaccctagacaccaagccttggcaccttgagtatgccaaatagtggcaagggcagataccagaggctaatgcaggtaattccaggggtactagagagcagcccgcttatccaaagctctgatctgaatatggataaaatgtggtcccagctctgacgctgtctccccatctgtggaacatatataacagtgagagtttcctcaaagatctactggaagatactataaggtaaatacgtgcttattacagtccctgacacacggactgtggtcagcaaaaggtaactactatttgtgtagtgatttttatctataaaatgtttaaatccacaaaacccagaaattattccttggcatgaagttagactctgaggaggataagaccccatcatacttaccattgctttcctcctttttaaattttttgaacagtttattatttttattacatttactcctgtgtgtgcatctgtgcatacaagcctgcaaacactgccacagccctcccgtggaggccagaggacatgtggaagttgtcctctcctccgtgtgggtttcaggaatcatcaggtttgtcagcaagcacccttatcttctgagccacctcactggccccgatcttgcttctattacaccggagaaaattgcagacatgcctcacctgttttcatgtatacagaacagcaaaagggacccatgtgtcttgaataagtgagaggtgttttgtacctggggtgagatttgagagaaaaaaaggtgcctagaaaaggcatttgagccagaattgaaacttgagtgaacatgtcttaaatgagtagatgggggaacacaggacagtactccacttgaaagagcggacaagggtaaagacatacacatatctctttttttgtttgtttgttttgggctttggttttttggtttttcaagacagggtttctctgtgtagccctggctgtcctggaactcactctgtagaccaggctggcctcgaactcagaaatccacctgcctctgcctccgaagtgctgggattaaaggcgtgcgccaccactgcccagctatatgaccggtggggccatgagactggagcagcatgcgcttggggaactgtggtggctggaacaaggtcacaggactggtaggcgcacataggcagccataaggagaatgccattttcaggactaggctctccaagcaagttttctggctgcagtgggagggatcagagcagcgtgggtggagtgtaaacaccgaggagccaattagaaaggtgctgaggctttgaagtcagcagccacctggagaagttggtggtgtgaactcactgcattcctgtgggagcctggtaaattcggactttattatcctctatccccaatctctccagaaaagcctgaccctaattgtgacttctatcttccttagctggaggtcacccagatgactaaagggtttcatggttcagtattctttttatgaacctataaggtagatgggtatgattagaaatgacttctaaagaaattccgtgtgcatttctaggtcccaccaaacctttccccgtggccactgtcaatcatattttggaagatgtactaactacctacctacaagaagcacaatatgacccagagttctgcagacaaatgactaaaacaatttctgaggtacagtgcaatttgcccagtgttagctagaaccacaatatttgccggaagatagaaaatttcatttcattttcaggatcagttcaatggcacacctatattttatagaaatagttattagatcatatacttagtctgtgcataggtatatgtgtatatgataagcctttgtctaaaactatcattgtgtgtgtgatttataacaaatctattgcttgtataaaactgttccacttctttttctaaaacaagatttatatttctacttatgtatatgtgcactcatgtgtgcacacacatgctaacaaagtatgcatgccacatgtgtgtgtaagtgccagggaaggcagatcccctggagttagagttacaagcaattatgaactccctgctgggaatgctgggaatgaaacagtaagagcagaaagtgctcttaactgccgagccagcaggtccatgccactttaaaaacaaaaaccaaaaaaaaaaaaaaaccaaaaaaaccatcctatacatttgtatgatgtatatgtatagtatgtgtgcatgcttctatatgtgaatgtgggcatgcacatgtagaggtcagaggacaaccttgcgtgttagccttcacatttcacctcaattaagagtctctactgttcaccacaacatatgccaagttagctgggattgtcccatgtctcccccatttccctgtaggaacgctgtgatcataaatgcccactgttatacctgacttttacttgggtttgggggacttgaactcaggtcctcacacttgtatgagtgttttacccatgagccatcacctcacccaaaaactatttcccttatttttggtaaatacacattttaagggctgttttcttcttgccacaggaacttttttgagtactgttgattgtacgtatcgaggtctttaaatacattccatgttttatcaactacagtatattttatgatactttcttctactttagtttttatatctaactctgggataaatgtttatgtctattatgttgtggaagatttcggaagaatatctttccctcattagtcatgaaaacaaaaaaataactctagtcatggcgttctttaaaaggaagccatcctttacagactttcaaaggatgaaataatcacttgaattctgtcctatagatgacaagctttctgcatgtcttagaaaatgccgacttattgctaatattgttattttgttcctggattcctgtcccacaagaacttaaagtacttaaaggaaagtttacctatggttctgtaagatactgaaaatttctacagagtaccgtgctattttctttaaacattttttaattcattttttaaaaagttagcctacaaaggaatgaacttcatatagtatttttacacactctctcctctcccattgggctctccctcctccttgccctcctccccttggtcccctccatccttcccaaattatcctcccttctgcttttatattatatactgtgtttaacaattttgcgatttaccctttattttttttatcattttctaggttattaagacccaggtcaaggaattagtgattccgagatataaactaattgtcatcgtttacatcggacagcgggatgaccagagcatagttattggcagcagatgcctctggaatcctaaaagtgatactgtctcgtcctatactttcaaaaattctacattctttgcacttgcaaatgtctatgcagtttacttcgagtgattgaaagtggtccttgtgtgttaaaatcatgaaccaggctgtgtgtctctattcacaaaagttctactggcaaaacctgtgggaaagagacaagatgaagatttcaaacaactggaagctttggtcgctctcgtgaggactggtggagggggacgggagcctaagaaacaggtcctgtttgttcaaagcagaagtcagtgccattcacataaatgtagatgctgacaaaatatcactctgagtgctaattattttgatttctcttttagttggagagctagaatttcctggaccactttctggtaaacttctagaaataaatggcaacatactctggatatataccacacaggatatatccacataggataattcaacatgacacacaaaaatggtgaatatgaataggccttagtactgcatataaaataataccggttttcattttacatttaataaattgagcagcactcattagctgcaattactgttacatgtacctgacagttgaaagtactgacatagaattaatgatttcgtaataattaccatggtcccgtggggccactggctaaatctagacgctcttgtgggttgccagcactttacaaaattacaagagaactgaacattggctcttcaataatggaaactataaagtggatacaggcttttaaggacactaaagtagacattgtgctattaaatatacatgatgcttaatagtaaatgtgcctgtagcacctaataccatgcattggaaagagacactgcctttaaatacacatagcccatgtgcttttgactagtttttcctgacctaccttttacccagaatacaaagctggcagcttaacaaataaaacatgtgtgtttgccattttgttcctctgagtttagcactaaaaacgacccagtgaggtttctgaatgtatggacattgacgtttacagggctgaaatagctcttctgttggcggatgcctcttgtagcatggatcgtttatctttatggggctttcaagtctttgtgtgcatgtgaaatgacgctgtgccattgctctaggatggcaagtcatctgcctagaggacatttgttaaaggtcaaacacaaattgttcacatatggagagaattagcgacgttataatcttaagggggaaattgcatgtaattcgtatcagaaagattataacaaatgaaaatcccagtcaatgcttcataatttcaaaatgttttgatgtcttacttttcactaaaaccaaatgtagtttttaaatgcattcctgggctttttctgagagtgctttagggggtctacgtagaataatgaccacatccaggactcgcctgtctccaaaccccagttttgcatctggatttgattatcagaggaggaaggaatgagaggtccgcacttttgtcaacggtttctttctcagacaatggctgtgaaatcgcacagcagcatgggaggaatgagtcaattgaagaaacagtttttacctacagaaagtctgctgtcgagacggcttcctctcagtgttctaacttctagtcagtagaatttctcactgttcctccttggttgtcttggtaaatagaaccttaaaatacagaggccgttcgaaatggaaaagggagtttgcaggcctaatgttagcatgtgctgtaaccgagattagttcagagatgcaccccagcagtggcagcagcataggagtagagagtaggaactcacacacacagctcattttcaggagagtgttattcaccactcaaagcctggagacaaagaaacagctcccctccatgagtggcggccttcccactctcccactgtagaacatcctgtgttctttacctgcaaactcaggtctcacctactcggatccgtctccatccatctccatccatctcctccctcccactctcctcctctgaccactcttagttcatctctcggttgttctccagctcttaagttttattcttccctatcaatgaaatctaattctttacttacaagcaagactcgtgagcactgtgctacccaacttccaactgtccagaaaatagcaatgcagatctgaacccttgaatactagagtcttaggggaatgacagcagggcacatctgtaccccagaactccagctgtggagacaggaagattcccatgtggcgacagcacagattagaacatgttatcccaagagagatccagaatgtcgttatccagtgaaggagcgtctgggaggctgtgtgaaaggaagtaatgactacttcttgactgtgatggaggcatagagaatttcaaaagatgggagaatagaggaagaaatttacaagggctaagagggcccacaaagatggaagggtgctgtctcctaaaggaagtccactcagaccatagtgagccagtagcagcatttctctaagtgaatagcactaagtgactctaagaaggcatgtcaaatggggtatgcagggaaaaggtctgcatgattaggcaaaaggaggctaaatcaattaatacacagagctgttgacatttcaagtcctgggtgaatgtgaccccccacggtcctggcaccttaactacattactggttttacagaggagcagcttcccctgatgtgataatgataactctggtgccactggctcagggttgtgtaggattaactacaagcctgctgaatggttcacagcttaatgtctaagagaagtacttgtggtcacaactgaaagtctgagcatctagagccaattgcatggtgctgttctgcaggaagaagccatcagtggaaatagtttgaagaataaaaccctgagtttgattttgcaccctcgtttaagttgattgtgagacatttcggccacaggcaactgaacaccgagctggaacatcaaagaaagagatttagacttggcagtcatccaaaccgcaccccccccccagacctccctcctccctcctgtcttatgaaatattcactagccaactctccagcaagtatagtcagaaacagccagctactggctttaccagaaacctccccaaaccaatagggctctactggttatatgcttctaccttcctcttcctcttccttctcctcctcctcccttcctcttcctcctcctctttttctcttcctctttttccttcttcactaaaacagtttcttatatcatccctttctgttgttagccatcaaaagaaatgttaagttttcctcaaaaaaataaccttgcaattccagtgcatatgatcaactgcagtcattgtttgctaggtgacttttcagacagcacaaagtaggaaggaggtcaaagtccaacatatcgtgggttcaaagacgaaatgctaagtcaatgaattcatttttttaagtcaggagaattagctagtgtgtgggagtgatttttaaaaagtcaacaaatcagacatttataaattaacactcctaaagagtgagaactctcctccttgggacatcatctgacctgtctttctacgtgctctaaaaaataatagataaaactcaccatccaacagttatctggttgtcatccctagtctcgctgatgcccccatcgtcagcaatcgggttctcatccaccaatctggggctgtcacaagcactcaaatgttctcccgggtcaaatgtgtggaccacttcacccacgtggcacctcggctcttttgaagaccttccttctgaggggctgcatacatgtaatgtatgtcgtttaagggaaggggtgatgctttcttcctcttctcttcaaaataggtttgtcttcaaactttttaccgcttccaacccttgagggttatgtgaatttggcaagcacccaatgccttcagcctgtttcatgaaaagtcaaagaggccatgattgtgttctcaggaagacggtatatgtaaaagagctgaaccagggctgaagagatggctcagtgattaagagcactgcctactctcccagagaacctgactcctaacactcacatggctgctaacagttgtctgtcaccacagatctcagagatccaatactctctcctggcatccttgggcacctatggtgcacacatgtgtgagcaaaacagcaatatacataagaatattttcttttaatttctgagacaaaattaagatagttaaaccaagcaggatgtgatagggcacacctgtaagtccaacacttgagaagtggaagcaggaggattgggagttcaagactagcctcagatacacagaaatcagacaccaacctgggttatatgaggctgtatctgtaatagtaataataataataataataataataataataataataataatagtagtagtagtagtagtagtagtagtagttgttgtactagtagtaataataaatagtaaatttttaaaagctgccctcttatagaaactttcaacctctgattttcacaatgcgtgttagctaacagcagtatgatagagaaagtctctaatcccagaactctaaaggctgagcctggcgaatctggaattccaggccatctttagccacataattagaccttgtctcaaaagaccatgggctggggataaagctctgtcagagcacttgcctagtgctcagggccctgggtttaatacttagcactgtaaaaagaaggaagaaagaaagggattgagcaaatacttctgtgttgtaaaaattctaatcccgatctgggctttctactctgccttagaccattcagctcctagataaaagacacacacaaccttcatatttacaataagccttaaacaacacatgagctgggcagatatctaccctctatgctattagaatttactttcctatcactaaccccgaatcattactatctttcatctgggctgctctgagctctagctggccagccctcagggccacacttttcacggctcacctaactcatggcagcttctcctctagtccctccttactctgaccccaagcccaggaatcctcaagccagtctacgtctcttctatccagctcttggctgtcagcatctttatttaccaatcagaaataacttgggagcaaggtcacatagcttcacttggctctatgtgcagactctctggggcaacacacttagcattataatacacagcaaaaaactgaacctcgacacttctgcaatttcttatcaccataatatgcctgtagattttttcttccaaatattcaaactaccatctttcagtggcagttttctcttaaatccacatctttcatggtactatctgttccaaattttgcttccagggctatctctctttgttcttatgcatctttcgtgcagagggctgggcccgcatcaggactttcctgtttcctgacagtgatgttgcctaccactgcccattccttgcttccttcttaaccatttggacttaagagttcattcagaaatgtgcaaacctccggagggtgaactgagaagaaccaagtctgctgaaagtctccgtaaagttctggggtagctttcagcttctttccctgccagctccactatgctgcagtcttttctcttttaaaggcaggctctaacttgaaacctgtggttctccatccaacaccaacttatttctgtacctaccaaggcaagaaaccagtataaccagaaaggggagtccactttgtttccaacacatgaccatggtggagcatctaactacaaaacatactcggtctgattttgcttcgtgggtgctgggaagtcactttataaatttatatgaagtaagtcattttgaaactaaagaaaaagatggtatatctgcgaatgaattatacaaatacattcactttagttcactttactttgagagtatagatttaaaattgttaggaaacatagctaaagtgcttgctggcatctcagtttacaagcacaagtcaaatgttgcaaaggatccacttactgaatgaagtagagtctagagtttaagatgagacttttcctaatccatatgatggggttaactcagtctgagatgagattcaagtaagaacactgtaaagaaataatgacaaatcaaattatatatatatatatatatatatatatatatatatatataacacacacacatacatatactttgtggggctggagagatggctctgttaagagcattggttgctcttccagaggtcccaggttcagttcccagcacccacatggcagctcacgtctgtctgcaactccagttccagggcttctgacaccccatagatttacatccaggtgaagcaccaatgaacataaagtaaaaataagttatacatttcttttaaaatgctttgaaacagatactaggaatgtcttttgcaagaagctccgactcttggatctactgatgcccagcagatgagaaagtaggagaaagctatcccttctgctttaaagctaggttcagatttgtgcccattcacccaggcgtgtcaaccactcaggaaacaccacatgatgagtggcctatatctgtgacctatatttgcctgtcttgtcccccttcaagggtaaaggcatggagacaggaggaggcgatgggcagagatgagagctggcagatctgctcctgctccagatgagcggagctagaccctggcccatgagcaactctcagcagtgcttgtcttactcagaagcaaacagaggcaagtcaagtgtgttgtttttatacttactgtgttttaaactcctttctgtttgcatttcctaatcttaattataggctattgtttttcccctcaaaacagaatcctatggggtataagtaaaaagactaggcccaactttctttgttttgtttttaatatacttaaattatacatttataacaataaagttataattatgacaaatatttattatatgataaatggtaataaatacatactggataaaaaatgtgcatgtgggccatcaagatggttcagtgtgcagaagcccaccctgacaaccagagtgtaattctgggacctccatgatgaaaggagagacctgactcctcaggttgtcctctgacccccatatgccacgacagacacacatccatacacatccccatgtatgcacgtgtgtatgcaggtgtgcacgcacacacacacacacacacatatatctagaaatttcaaagaatttcaaggagcatttgtttatatggagaaacctattaatatttaaaatagaaattttttaaaaaatgacatttaaaaataacaccattacatgttattacaaatattgtatttcatcaaaactattttacataataaaaacaattagtaggtggagcaatgttgctttgcattttgccaagtgttgtatgactcttcctagggagactggaaagagtctatgcaaacccaaataggagacaaacaacaggccaaaaaaaataaataagtaaataaagtcatcaaaacccagctggtgagccaaagacttgcttggtacctgctatcacagcttgagtgaggggtgacttccaggcagctgcatcaccatgacaacacactagagctacattccctgcatagcttcccaccttctgcagcatcagatctcctcccctggcatttatttacggctacaccttcaggaagcggcttcatgagccttataagttcctgccacttacctgtaagcttcttgtttttctgcatccccttccgcgaggggatgtttcagccctgaacaagcagctgcacagctgcaacccacactgtctggctccataaaatnnnnnnnnnnnnnnnnnnnnnnnnnnnnnnnnnnnnnnnnnnnnnnnnnnnnnnnnnnnnnnnnnnnnnnnnnnnnnnnnnnnnnnnnnnnnnnnnnnnnnnnnnnnnnnnnnnnnnnnnnnnnnnnnnnnnnnnnnnnnnnnnnnnnnnnnnnnnnnnnnnnnnnnnnnnnnnnnnnnnnnnnnnnnnnnnnnnnnnnnnnnnnnnnnnnnnnnnnnnnnnnnnnnnnnnnnnnnnnnnnnnnnnnnnnnnnnnnnnnnnnnnnnnnnnnnnnnnnnnnnnnnnnnnnnnnnnnnnnnnnnnnnnnnnnnnnnnnnnnnnnnnnnnnnnnnnnnnnnnnnnnnnnnnnnnnnnnnnnnnnnnnnnnnnnnnnnnnnnnnnnnnnnnnnnnnnnnnnnnnnnnnnnnnnnnnnnnnnnnnnnnnnnnnnnnnnnnnnnnnnnnnnnnnnnnnnnnnnnnnnnnnnnnnnnnnnnnnnnnnnnnnnnnnnnnnnnnnnnnnnnnnnnnnnnnnnnnnnnnnnnnnnnnnnnnnnnnnnnnnnnnnnnnnnnnnnnnnnnnnnnnnnnnnnnnnnnnnnnnnnnnnnnnnnnnnnnnnnnnnnnnnnnnnnnnnnnnnnnnnnnnnnnnnnnnnnnnnnnnnnnnnnnnnnnnnnnnnnnnnnnnnnnnnnnnnnnnnnnnnnnnnnnnnnnnnnnnnnnnnnnnnnnnnnnnnnnnnnnnnnnnnnnnnnnnnnnnnnnnnnnnnnnnnnnnnnnnnnnnnnnnnnnnnnnnnnnnnnnnnnnnnnnnnnnnnnnnnnnnnnnnnnnnnnnnnnnnnnnnnnnnnnnnnnnnnnnnnnnnnnnnnnnnnnnnnnnnnnnnnnnnnnnnnnnnnnnnnnnnnnnnnnnnnnnnnnnnnnnnnnnnnnnnnnnnnnnnnnnnnnnnnnnnnnnnnnnnnnnnnnnnnnnnnnnnnnnnnnnnnnnnnnnnnnnnnnnnnnnnnnnnnnnnnnnnnnnnnnnnnnnnnnnnnnnnnnnnnnnnnnnnnnnnnnnnaattctattaaaaattgaaaaaaatcctccccttaactaaggagctattggcaattaatggtcatactttttaaaggcttgacccctggaaggtcaactgcatgccagtgaaagatcacatgtccaagagtggtatatgagcagcacaaatatatatatgagatctgggaagaattaggggaggtgggtaaaaatgatcaaaatatattatacaaaattcttttaaaaaactaaaaaaaaaaaaaaaaaatcaaataaagcacacatagtgtagaacacatgcagtttactggacatgaaagcccagtctcagggggtgaggttggacacagcctgaggaatcatcgtgtgtgcaaaagtagctggggtcaaagtctctgtccatgcagccccgatggatgaacgaggctcaaactccccctctattcccaatatgtccgttcaagaaacaaaacaaaaagcagagaaaggaggtgtgttcagtgtggccacactgggaggaggagcagataagcagcctgagtctgccttggggtacgtgagggttagggttagatgggggggacaggtagaggaatgcatatgaaactggaagagacgtgatcctgttcatcagctgacaccagatccactgtcaaagctctgtaacattcctcggaaggaagagcctccgctaacagcagggcttcagacaacagcaagtcctgcaagctcccttcctgcagcaagccctgcctgagaaaatgctaatcctttggcattcattgctcaagaatctgatagtcagtgggaggagagcaagtatttcttctcttaaaaatatcttccctccagccaggatggctgcaactatactggcctacatttcatttcacttttaaacacacaatatttgtgctttctttgggaatttcatacttatgtgcggtgaactttgatcacgagctccctgcttccagcttgaactcttctttggctctgcccctcccctcttgtgctcccttgtaacttcttgcctctttctttctttcttttcttttttttaataacccactgaatctaattagtggtgtccataggcacatggctgtgagggccgccattggaacacagtcaagcacctaagacttctgtgagctataattcaggaaggcttttactacttacaaagcctctagccaggcagcttttcctgagggacttatcctatccaggtgattgatggggtcgcttggattgaccttctttcaaaaggccaactgtattttcattctctaagaaagtctcttacagatcatagtcttgagatttatttttattttatgtgtgtgtttgctgcacgtatgtttgtgtaccatgtgcatgcctgatacccacaga

SEQ ID NO: 875 - DNA, 1005 bp, Mus musculus
gcagtgtggctttgaaaccatgcctccttcaggccctgcaggagatgtctatcgtctggccttgaccatcagttccgttcctctcagatgaacagtagcccaccacgtcaagagctggccctgcgcttttacccacacctatgattgttctgccagtctcctgtgctaggttttacatctgtcagtccagggcttgactgttcatgggagaagggcaggtttatctgagtttgtggttccagaggggtaactatccatcatggcacagacacatgggagcaagcagcaggcacagcggctggagcagggtgctgaaagcttacgtcatggagcacaggcacagagcagagagaacaacgtttccctcagtaccgtgtcccacgcggatgagcccagccagcgtgatgaatcctctcgcctcacagtccggatggaaaacacctaccagttaggtcccaccaaacctttccccgtggccactgtcaatcatattttggaagatgtactaactacctacctacaagaagcacaatatgacccagagttctgcagacaaatgactaaaacaatttctgaggttattaagacccaggtcaaggaattagtgattccgagatataaactaattgtcatcgtttacatcggacagcgggatgaccagagcatagttattggcagcagatgcctctggaatcctaaaagtgatactgtctcgtcctatactttcaaaaattctacattctttgcacttgcaaatgtctatgcagtttacttcgagtgattgaaagtggtccttgtgtgttaaaatcatgaaccaggctgtgtgtctctattcacaaaagttctactggcaaaacctgtgggaaagagacaagatgaagatttcaaacaactggaagctttggtcgctctcgtgaggactggtggagggggacgggagcctaagaaacaggtcctgtttgttcaaagcagaagtcagtgccattcacataaatgtagatgctg

SEQ ID NO: 876 - protein, 172 aa, Mus musculus
LSIMAQTHGSKQQAQRLEQGAESLRHGAQAQSRENNVSLSTVSHADEPSQRDESSRLTVRMENTYQLGPTKPFPVATVNHIDVLTTYLQEAQYDPEFCRQMTKTISEVIKTQVKELVIPRYKLIVIVYIGQRDDQSIVIGSRCLWNPKSDTVSSYTFKNSTFFANVYAVYFE

SEQ ID NO: 877 - DNA, 46582 bp, Homo sapiens
tttttttttgagacggagtctcactctgtcgcccaggctggagtgcagtggcgctatcccggctcactgcaagctccgcctcttgggttcatgccattctcctgcctcagcctcctgagtagctgggactacaggcgcccaccaccacgcccggctaattttttgtatttttagtagagacggggtttcaccgtgttagccaggatggtctcgatctcctgacctcgtgatccgcccgcctcggcctcccaaagtgctgggattacaggcgtgagccaccgcgcccggcctatgagcaccctttctaacataagttggattctcacatccagaaataaatctcccaatctattctgggcaaaccccaaacctctgcaaattgttgatctatggaaatgtgaagaggcaactagctgatctgaaaaactgaaaattgatttggaaactttatgtatcttttattcgtattgtacctctgaagtatgcagtatctggctcctaggggtagggaaggaggaatagaaaagttacccatataataattacattattgaactaccagataacctgttgacatgctgttttgttttgcaggaaaatacttggcagataactaatgaaatcttatgcaaggatttggaggattcatataatggagaactgatgtatgagaaacagattttaattttggtttgatgaaaacaaaccaatatctgcacttgggatatatcaggtggaaagtcaatgactttcatctgtgatttccctcacacactaccatgatgaccagtcctacagtatttacttctaggtgtaatattgttaatggttttaaaatgtaattattgtatttgtaaattgtactctcattccagtaaggcagttagacacttgagttttagcattttaccattcctgaaatggatataatttaaactgtggtatgtaaatttaatagtagtattgttgaatggcacaatgcttacagaggtagattgcattttgtcaatatataaaatttaaatataatattgatagctgtcataaagggggtgccacatattaaagaaacttaagtggaaccagaagaaaaagaaacaaacttacttttcttcaatgcttagtatgttttactctagtgctaaataaaaactctatcttcaaatgtttagtgggttaaattgagaaactatttcagaaaaaaattctaaggttacagcatattcaaagaaaagcattagttaccactttttaaaaagcttttttttcaaactgcaaatttcataaaaatgcaaactgtgtaaacagggcctcttatttttataacttgtgtaaaaagggaaagcaattcatatttaaagtttaagtatattaaattataatcaagagtaaagaagatgctgaagtcttaactacttgcccctctctacagtttcgcaaatgtggggattgctgaataatcagtcagactaaaaccaaaattgtgattttaagatttcaagactttccgtagttgaactggttaagaatttttgcttagttactctgaatagatgatcttactcatccagtatgggggaatgatacctcacgtcttcctctttacccacaggaatcaaaacgctgagactgagaattttagggaaaaaaaagtccactgtttagatccagaaggagagttttaatcattgtttatatcatttgagaatgaaaaaataagcttcataaatgaaattctattcacattactgtgtaataaatttccttttggatgattaggattcattgtataaaactgtaaatctttgccattcttggagaagcaaaaggagagttatcaaaaatgtatgtcgtttcatcgttgcaaggtataataaaaactgtaattattcaatctggccctgccatatgaacatttagaaagacaaacttcttcgggagtctcagttgtaaaaccttccctcattaatatctgaaaatgttagtcttcctttaagtcatagaacttatttaaacataaaccaatttctattacaggttatgctattaaatagctgtaattattaagttattatttttataattagttgttaaatttcattttacacccactcaaatttaacaaagaatctttagcccctttaaattttagaattaaattaaatttttaaagttttacttctaaaatgagattgtgactggcaattgtttatagtgaaactttttaaattaatctttgtactcctctatcagtgcttgctaccaagagaatgtccaaaatgatttgttttaccatgggaaaattcttactattcaacaaactctcagttggccccctacagcagtctggtgttgaagtttctttgaacgaactaaatatactcattttatgtaaaggtatccaatttgattttgaaaccaaaatagaaaatgcaaaattctaaattccatgaaacatggaatttatgacaccaaaatcaatggagagtaagcagcagcaaactgagaattatccagcatatgaatataacaatgtgtttttaagtaatcaattcatttaaaaaattgaatattaatacaaagcatattaaaaacatgtaaatattactggttctcatgtctttgtatttatattttattttgttttattttgtatagatctagaatgaattagtaattaaacacaagggtttttttcccaaaaaataattttactgatttttaaaaatttaattaaaaacatagattacagtaatctctaacattattcaaatctttctagggattaaattagaaactatgaagaaatcctataatctcttaactggtctttatggaacagaatgggagtcaacaatttcaaaatgattgaactatgagtaaccagaacctcaatagaaaatgtatcccttcacctttcagaaaagagatcaaataataacacaataagctggtatcagggatttgcattttgacattttgttgtttctttttaattttgtagattataatctcctgttacatctatatccacagtactgtagaataagaattcatgtcctgaaaatggtcccaggcaatgaaagagtctcagttatcaaagacattaagtcagattcatttattcattttattcccaagtcagaacaaaatgaactagtaggtaataaaactattttcagtactaggggttaaaacaaaaagaaattgttctagttaaccagaacaccatttcctgaacgttatgatctttaaaaggttctgctttagcaagataaaaagtataaatgatgctactttattttggcaacatggaaattttgtttttcttttccaataaaatccatattttcgtgaaatttttaaaaataaatttgtatcaaggattagtctgaattttatcataatagaaatttataattactaagaattaaatttttaatcatttttaaagctgtgttcttctctacacccacagccaaaatggaaattcactgtatggtatttgggaatatatttcacctgtaaaagaaagaatgtccacaattcaaacggttttgagttaatagataggaatccctcagtcaaactacagaattttttttgttttatatattcttagtcagcagagtgtttgagctataattacaagtatttccacttctaaatcttcttttagaaaagcagataactataataccttggctctgccactgactcctgccgtatgatattggacaaatcactgcccttttcagtttctcatctttagaatggggagttgggattgccagtggttttcaagcttttcttaacagcagggctttttttctaataaaattgcacatggaatcctggtaggcaaaacagctcaaagcaatgcaggagtttctccaacagtttaaatcggggctccccagagcatggtttaaataccataacagtacacaatgatctatcatgtgtcttccaactctgaagttccacagttgtaatttactcagataaaccaccttttgaggctttataagcaaacttgtaaaaacacagtaattgaatgatatacaataaaaactgacagagtgtttaccatgtaccagtcactagagatattagctcatttaattctcttatcaatcaaaaaattgtaagtactctttttaattcctgttttacaagtgatgacactgaggcttaaatagaataatctccccaaaatgacacggcagctgaaagtaacccagctattctgactgcaaaggaaacgccttaattgctttgtccaccctgaacaaaacaatctgttttatgtcactatacgtactccatttgaatgccaaggtagaaggcaccatgaaaaaccattaccaaaataaggataattccaataacaaaactgtcaaaaaagaatcactgcttctcaaaatatgattggtatcatcacttattaatgttttgtatcatcacttattaatgattttggcttggtcaccactatgcctggaagatagtaggcactgataaacattgttaaacaccgtaacaacacaaaatgatctaccacatatcaatgtcttccatctctgaaattccatgattctactttactcagatataccaccttttgtggcattataaggaaacatgtataatcaagttcatacaagctatacacagtaggcatcgataaatttgtattgacagcataaacttctagggatgagatttgggaatatacattttgataagtgctccaaatttgagaatcattgctctagtagatctctaaggtccttcttagttctgacattatatcagattttaagcattaaattctaagatgaaaaccatttttctagtcagtttatttttcattcagtccacttaatttcctccaatcttaaaaaatttttttccctaggaaaatccctatctttttcttaaagttactctgttatactatctcagtctcaaagtagcctgaaatgcattttctcattttcatatttctgtccttttcttcaatgtcttaaaagacttgaagtagaagggaagttgcaagctgttatttattcaaatacaaaatcctaatcaatgtttccttctttgcaagggacattcagatctctaacttgtgagttgaacctatttattttgtaagcttttgactttacaaacatgtggtagcctcattctaaaagagttgcacgaatattttttctcaaaataaccacaggctgtaaattaaattgaacaatacagtaaaatatgcagatacatactaaacagatgagtgtgtgtgtatgtgtctgtgtttaagcttttccttttccaaaagattatacatttgagcaaaatcccattcagtctaaatgtactcattttgccacatggttttctgatcagcaatttttttaaaaaatggaagtgttacattatatttaataatatcaaaacaagagtgatctctaaatatagctttgaaagttaatataatatgatgtgtccatgcaatgagtcaaattagattgttgatataaatgaacaaatcaatccaagttacattgattaaagggactatttggatgaccagcctcaccatcttttactgtgtgcactttcctcttaaggttttattgtattttccctgctcctttaggcttttttttcatgtggaaaacagtatctaaatgccattctctcacttatgaattaaatatggctaccattaatgttcctttttgtcagtggagtgtatggaaggaaaatgagataggagtacattgcttaagtctctaaatattaaaaacaacaacaaaacacttgcctttctcttgtgtcattgcttcaatgttctgtcatcttctgcaagctagagttgcactgctgacatctaattaagatctaaatatatttcatgaaggaatgtcaaatgtaaagtctgttgagttgaccatggtgaacctcttgattggccctcacatttaatatctgatttctctcctaaatgggtatgtctatgaggaaaagacacctatttgttggcattgaccatgggtataataatttattctctaggtttaacttctaaaattatttttcctttgatttctaactgcctccttctatccctagagtaataccttgcctaccttaaatacatctttatccttgtaaaaaatgttttggcaaaaaacaaatatatttttaaatgtcccgtaatgttttaaagaaaagaagtaaagtgtatttgggctatgctcaccaatattccagtattttacaaattgtgttctggaagatgttcattgtggtctgagaacaaatggtcctatactataattctctctccttggacattgacaataaatgttagtgttttaatgaagcttaagaaagttattgaatcaggtaaaaaaaattttttctaagcacaccttgagaaacctttggaaaagttttcttttaacactagtttatatatccttcaataattgtaaataaaataaccaggaatgctttgaaaaaaatgcttctggaattttgttttaattttaagagaattcctgtcatttcaaatgaattgttatctattttaaatttcattagtatctcttagtgaatttaactttatcatctaaaatattcaaaacaaaacaataaaattattttaatttttgtattatttttaaggcttgcacctatgaccagcatatcagacccctatctgttgaagatgtttccaattctttgccgtgtggaattaatgccagtgaataatctccagtaacgttttactaaacagctttaggaaactgaatcatgatagatcaatgttgacagtatttttacatcagcttgtcagaaattatattaaaaacactttggggaaagctaagagcagtgcactgtttagcacagattttgtgagattctatactcttttaatgagcatttcatagggttttttttttgctgtttttttttctttttttgctttgctttactttgccaatcagttacttttataccaaattaacgaagtttctttaaaaacttcctggttaaattgtctgttatcatatagaaaagaatcaaactgaatcactttacatttctctaaagatagttcagtttttaatccatccagagtttgtgaatcagcctgatagatcataagccatttataatttttaaacgttccattgaatgagtatatcatacaaatgttaattccatctcgctcattcagttttacattacttttatgaattttttttctcgcaaagtaaatgcttgatgttattcattcaccatcactctaaggtattttaaatcatacaacaagtaactatcacaagaaccactgtcccaagatccaaagtcagatttttttcccttttcaagttgctagaatgataattcatatagctgtgttgatttttcaggtcagaatttagttcttgctttgttaaatggacatacatgaaagagattggctcctatctaattcatattctctctctctctctctctctctttctctgtgtgtgtgtgggggtgtgtgtgtgtgtgtgtgtgtgtgtgtgtgtctctttcctctctgtctaaggggaattggaaaattgctgctgaataatttttcttgaaaaagccaagtgttgatatgatgatatattaatcttatctatgaacagagcttcaccacaggccaagcagtaatgtatacagctggctttttaagctgtttgaacactattgttttcgattaaaaagagtttttgtttgtttttcacttgtatagtaaaagatcatatgaattaaatactcggatattaattttcattcttactaagtggccatgtaaggcattgattttttttaaacttgaacaatgcaagaatctaggaatctcagaaagattttgctgtgtttctataggtaatgaaatcctgtcaattaaggaaaatgctgtgtgtaatttgatttggtggtagcctttatttagagctctctttgatctatgtagcaaaaatacactaaatttctttttaatcttgtactaagtacataatttcacaaaaataccttgggcataaaatacttacaaaactgtgaattaaaatactcaagatactttcaaaatttagtcaaaatgttgattcccagcctttttcctacacgtctatttcaaaagagtatacttttttctgacagccattactgcttagtctgtaatgaaagctttactgcttctatgctgtgctcaagagaaaaccaacaacggaagcgaagacttacttgctccttcacagaattgcagcaaagctctctgctgggcaatggtgacaggaaagtgtgtaattgacttgttgaagataatcatgagaccatcttaacattacttgccttataagttagaaatagtatggatatcactctttgtaaataataatttttgtaaatgttttttgttcataattttcccaatcacctatttcacaaaatcctgaatatgcaattatttattatgacacgttactgcaactagggctcccattccagaacaaagtttaattctatatgtaagttgttactgaaatgtgatttctttttctggaaaataaatgaaaaatatgaaaataaattgaattgtgaatatcttttgctgtcagcctcttaaaattttacccgcatttctggaaaacttcattccatgtttagggtagggatggtgggccaaaggtctgtcaaaggtcaagggttaagagttagacaaatttcagctctgtgatttaaatatcgacttgagcatgttactcaacgattctacatttccttatcttaaaaaaaaatagagtaatgtcccctatgtcatagtcactgaacaaattcaatgagataatgtttattcatcacctagcagttcctatctagtccatagtagatattcaatcaacaatcctttcctgttcttatctttctgtgagtagagattgggatgggcaaaaatatctatttctcttcttccaacactatcctaacactgtgctccaccggaatcccaatgtattactgtcagctaatgctaattccagcaggacactcatcaagagccatgcccttggctagatgcttggaggcatcttgtttctgcttccaatgattgcccactacaggagggtccctatagtgtttattttgtttgcttttggtttggggaggcccaaaccaggcttaggctggggatagtcgctgaagaagaggaaaagcccattcataccagcaggtaggtcctcaaccccaaacagcctcatttcaaagcttcttagacattaacaggctcagaagagtcttgttaaggaaagcgaaggaacccagcccggtttgtaacacattggagttaagaccatgagtttcaggggccgtgggcatattatttaacattttagaatctcaattttccaaatcctttaaagggaaaacattcctttcttgacagagttattgggacgactaaatcccaatgtttgtcggtatctggggtatctggccaatgtaagtgctcatttacctccacattccaccgcctgtgccttggagggggaacgtgcgaagcagcgttaggagccgggaaaagggcagggctactttactttgtctttgcgcttcggatttcctgtgctaggaaaccgcagcacttcccactcctgcccctgatgtctgcgggaaaaggaacttgatgaggggccctaggggtgcaaatgtctttagtcccaaatgtcttcctcgctacacaatgaaccagttcccctccagctcgccgccaacccaggacgcagcccggctcagagtgacccccagtgggcagtgaagatgagatcctctacatccttagggcagctcagagggccactcagcggccaagtccggccggggagggccgagggctctgtttgaggtcaccctggagaccggcctcagagtccagggagagtgcgcgggcggccgccggctgaatgaagcctgggacgcgggagccgcgccgcgcgcagtgtctgcagtgccggaggtctgggaggctccgggcgaagcctccctgctgcaggtagggtcgcctctctctgcagcgcgtctggaccccaaaggaaggatagggggcaagggatcggccctttgttgagaaatggccctacttggccccgatctctccgccaccttattcctcctctccccaacacataagaaaaaatgatcccaaatttgggaactgaaagtcggtcccaacggttcgtcccctgccccattgcatggctgggggctgggcttcaagagtgatggccaacgcagagccggccagcaaggtcatcccctgacccggggcggtcttcctgtggctggccgcacccatgaggacctccaggtcccaactctggcctttcttggggagggggcggcctgcagggcagctttggaaacagctgaggccgagatgggtctatgtggctttgcagcaaaacctgaatgacccacctaatcaggctgtgtgtctttccacactcataaacacactcaccttcgtacacacgaacacagacacacttatacacacaggcacctgcacacacagagatgcacactcacaggtacacactcaaggacgctcacactcacgtgcacacacacaccacgctgcctgcctcacccacacacagcacctctgctctgacattgatgccactgggttttagggtatgttcttgtgtgccctacctactcaactgccagctccttgaaggcatggattctcttctatttttatgctttggtgtctagcacagtatttccttatcggggctctcacatttatagattatgaaataatttaaatgaatacttaaatttgtaggtagacaatgagggcattattagagttatagtccaagttctgggaagtccattgctactaccagctttttaacaagtattagtaggaaggagggagttttccaataaattatttatttaaaagttaagtcctatttgctctttacaaactatgtaaatgttgctcgagaaaacaaaacaaacaacaaaaaatctttgggaaagcaaggttaattttaatttttatttatttatttattttctagctccctacccctaattttattttttaaagtcatggtgggtcaggcacagtggttgatgcctgtaattccagcactttgggaggccaaggcaggaggatcacttaaggccaggagattaaggccagcctgggcaacacagaaagatcttgtctctacaaaaatgtttaaaaattagctaggcatggtggtgcaggcctgtagtcctagctactagggaggctgaggtgggtggaccgcttgagcccaggagtttgaagttacggtgagctatgatcatgccactgcactccagcctgggtaacaagagctagatcctgtctctaaaataataaaataggccaggtagagtggctcatgcctgtaatcccagcactttgggaggctgaagcaggattgcttgatcccaggagttcaagaccagcctgggcaacatagaccctatctctacaaaaaattaaaaattagcccagcttgatggcatacacctgcagtcccagctactcaggtggctgagttgggaggaacgcttgagcccaggtgtttggggcagtagtgagccatgatcatgccactgcactccaacctgggtgacagaacaagaccctgtctcaaaaataaaatataacagtgacagcaaatattaattagcaaagttgtattatggttacatttggggggcaatacaaatattggtttctgatgtaggatagcatctttctgctatacatgcatatcttttgtcaatgacctccgtcttcatcagctaagcatttttgctatagcttaatatctgcttatgtaaataattatactattgcataaataagcattttcagagttatcatagttccagtttcactgatcagaataacaacaaattctatatattgctcttgaggaaaccccactttcctgttcaaaaatggtaggaaaactatctgtgtactttgagattagtccctgttatactaactaaaatgtttccggatctttcttttgctattttacaaaagtcttcttccataggttatgatgatgtcagacaatgctaaaggcagagcagctcattcatggaagaaaagagggagtatttcttctctaagtaatcatgaattttggcgaaaggaaattcatgggcgcatcaaagagtgagtaactgtctaaaattgtaaattcatttattgaataaataggttcgtaatgtttattaggagaaaaaaacacttcctcggggacataaaaagagataaaatgggcaagtacaaggtgcaggtcatctttaggggccatatttaaaaagaaagagaaagagagaaagcttaagtgataagttaatcctagcagcatttttgctatttcaaaaatcatcccaaaaaaccctctgctcaaaagaaacaccacatgcaatgtaaaccagacacgcttatatgtcttttgagttcttctcctcaatattttataacataggttttgcatttttgtaatcaatacatacatatacaatgtacttaacattattgtatataattttgtcatgtattttcatagttttttccatatcctcttaaatgactgcataatattttgtcaatttatgattctgggttccttaaccattctctaattattggacactttaagtttgtttccattttttttcttttttactatatgtctgtgcttggtcatttcccagaagaataattagtaggtcaaagggcaataagtagattttttggttcttgctacatgttgcatcttctctcctaaagatatacatcaatttttaatattttcatggcatttccttttgactgctgttgggaagaaaacaaaacaaattatcgacgtagcagtcaattaataatagactttcgttcttagtttctatagctttggaggatgttgtatattgagtatatattgggaagcaggagctagggtgtcctgcagaacagagagtagaagaactggaataattagaattctgaaaccaaaatctttctattctcagagtgtattaatgcctacttgcaactccacattccagccctggaagtctgtggattacacatacaatgccttttacaggtgggaaactgactataaaggagtagcaatcccagcacatgtcagaagtaaaggtgggagaatgattaatctttgtaatttttgcttctaaacttttctggctgctatttccaatagttaagtgcaagggttattttttaaattatttaaaactgattgttggcttaaattcaacttacgttttccaagaaactatttaagtaatagtctgacataaattacgtacccatgatatttttttaaatactgtctccaaagattaaattgtaattcctatttgcatgacttttacttatcttttccccttcaaaacaaatttgtcatatagaatcagagtgtggctacatttgaagaattagagatcactctttttaacctattattgatgaatataaatacatattaaaaataagaatacaaaaatcatatttatcaacacattaggatagatttttcactgacaactacatttaaatgataactattttggttttggactcccaaacaaaacatttagaatggaacctctatttgtactttttttcttaaatagcaaatgatcagcttccaagtccccttgcaatgcagactatttaggaggctcccccaccccatgctaacttgtattaatacttgctttccattggcttcctcactgtctggaattagacagtacaagttattctccttcatgaatgaggcttcaactagtagaaaaattctgaaagcttagtgactatcaaatacaggcattgttttgaaattgcagtgttttatggaaaaacatataactttcatttgaaaattactttaaaacaattttgaaaatataaatttcaataatgtaaaacattctgaagtttattaaggactgaatacattatctcactgaatctccccagcattaatcctactaggtaggcatcatttctaccactttactatgaaataactaaagtttacaggtcaagtaatttgacttaatgattaggatacagtcccaaatcctgactatgagatacaaagtccacagacccctatctacttccatagcaccatcttccccaccatcttgcgggcatcatcccctccagctatactcaattattcctcagtgctctatctggcccccagccattgccccatgttgcttccccatggggtaccccgactccttgcctgcaatgctcttcttacactattcccctggctttcttcacttcttccatcagaatttcgctccatctccacctttttgggaagtgctctctaattactcatctatgaccacctttacctccagactgcattggatgatctgcctttcttctcctactgcttttgccttcgatatgcactatatttggtgatttgcttgtctatctctttcaacagactatggacttatttgtctttttagcggtaaccacacttataaggaggacatgaagagtaaaggtagacctccttgaaaagctgcttcttatatgtggtataagatcagcacagatttagccctacagtcttggtttccatgtctacagtcttccacagttgtaactaatgcttaacaatgatccccagacagaataaatatctgaaatgccttctgaattacaaaaagaagattaaatttatattaaatattattgtgaactgttttcaagattgggtctgtttttaagttatcttttcaatttaatgtaatttttatgttttattaaagaaaaaacagaaacatcttaagctggatcttattatcctaactgttagtgtgttggcatatttctgttagacctggacatacatatatcagacccatgctgtctgagtccagacagtacactacacagtggtcatcatactccatctgtaatttcaaattattttttacctgaacaatttataataataaggatgataatagctaacatttatagggcccttgcgatgaaccttatttatgtatcatagaagctccataataggagttggcaaactatgacccaagggcctattccaatctgcatctgttttgctaaatacgatttttacataggtgaaaaaaatcaaaaggggaacagttttttttgcagcatgtaaaaataacaagaaattcaaatctctatatgcataaagtttattaggacacagccattcctattcacttgtgcgttgtctctggccactttcgcactgtaacagcagagttgagtagttacaatagaaaccgtagggcctgcaaatccaaaaatatgtgctatttggccttttacagaaatgtttgccaactcctgctctataaagatagatgttattatctcccccattcgacaaatgaagaagcagaagcttagagagattgaggctccaaagctacagaattaacaagcagcaaaaatgggcttttgtttattagttgagtattttcatttcctgaaaattggcaatccatgtgtgatttgcattaataaaactattctgttcattcaccagaaccttctgtttcccgtccacagtaagagcaggtctttacaattacatctttcttattggaagctcagactttggcagacactgaacagtgtttgaacagatgtgcttctctcatttccttaaaatggaaacagaagctatgaggtcaagttactttcacaggatcatgtgacatgatgtctaggcttgttatctgtgaggccaggagttccactagtagattagggacaaggttgggggctgaacattctctcctttgcctcaaaccaaaattacagtgatgtcatgttaccagaactttctgtatggatcccacagctccccgtgtgaacccactgatggcatctaacataccagttaggccacactatatgtatttcttcatttattcaggatttattagcttctatgtgccaattactgtgccacatattaggcatataaaggtgaataactacaggtttctaatttagataagttcatttttcagggaaactgagagctgcctggtaacttttttcacattgtctaggtcttgccagtaaaagtgaccaaaatggaaatgattgcattcattacttcatttcaacagtaatgaatttattctatcattcaatctatactactgtgagctgtttacgggcaattgaaaatggtgctgccagaacaatttcttcattttgatacctgaaggagaaggctagagattagaagatcagagttaggagataagttgtatcaccatgtatgttaaactaaagcccccaacaagacctacctgagatatagcctcccccaaaaagagaaaatagtttgggaaaactgaaatggccatgtttccaaatgaaaccacaataacaactaatattgtattgtcattttaggttattaagccatttcacatacaatatctgtgtaagttaaacagacaagatatttttatccccatttatgtttgtaaatggggaaatgatagattgtgttggcagaaaactggctcattatagggaggaaaatgaagctggcctcctaccttatatgctttgcataggtaaactccagatggaagaccaaaatgtgggaatctattaacaaagctaagagaagaaagcacaggcccatatctttatgttctaggagtaaggaaagatttctgaaagaagatcccaaaatgaaaactcacaccatagagcaaaataatttttggataaatataaccacaataaaatctagggcttctgctcaacaaaggatacaatagacataattaataggctggctgaagatacatacacgtttttttaaaccctgtacattaacaacttatgctaggaaaacaatttttaaaatagtcaaagaagacagcaattttcagaaacaaagcccaaatagctaagcagaatatgaagaggtgctaaaactcactttcaagcagaaaaaatataaattaaaacaagataccattttgcacccatccaaatggcaaaacagaagaaaagagaataataccaaatgttggcaaggcatgtgagagtaaaacctgatatcgccatttggcaaagaaagttaatggtttttagaaaatacaggggtgtgtctgctttatcagagtaagagcttacagaataatggctcacaaagccctacatgatctagctacctgatacctttgcaactttatcttctttcactccttttcttcttcctccctctgctacttgtctctatgcattttctcaaacacactagcagcctcctgtctcaaagcatttgcatgtgctgttctctcttcctagtatacctttccctcagccatccatgtggttcatttcctcacctcctttctttgttcatgaaggcctaccttgaccacttcatttgaaattgcacatcacatcttctcctccacccacttccaaactcccttaacctgctctattttttctcttccctgaggcatgtatcaccttttatcataatatataatttgcttgtttagtattttattgtctattctctgtcttgccttactaaagtaacagttccatgagagcagagaccatagtttgtttttgtttttgttttttttccagtattgcatcccaaagacctaaaatagtgcctggcatataatagtcactcagtacatattttgtgatcatcgaatgaataattgttgcattttatcaattcctgagcaagcaagtttcttttgctcacgaacaagttaggttcacaggtccatgcatgtgttaagtccaggttgactaggggctttcctcttatagacataagatgcatttacagcaaatagaaaaatgcttgttcagattttcttaatgtatacctttacctccatgctgacacattccattgtgcatctatttttaaaaaacccaaaagaacagtttcatttgtgttggaaatctgttgtaataggccacactcctccttgatgatctccacagctttgtagaggtattcatggcacctgcactaccagcatcacctctgatgattgcccagcgtgacacagctttgaaccaatgcatttcatccaagagctgcaacaaaagttcatcagctgtgcttaactatcacctcccttgctcttggatgagcattagctcaacaggcttcagacactaactctgatcttctatccacatacttaaaattgttgtactttgtcaatcaccatttctggattaccttcaattactccagagctgcgcttttcacaggttgcatggttcattctttatccttcagcatcacttctactcgaaaaaaatatgttccacaagacagtgtcatttgtcatgttcctgcctctttcatttttgaaaattatcttttctttccattatagcctttctcttactagtaaaatggagcaaataatgtgagtaaaatacctaaaaactacaggcatactttggcaatattgcaggtttatttccagaccattgcaataaagtgtattttgcaataaaggaagtcacatgaatgttttagttttccagtgcacataaaaattgtttacactgttctgtatgtagtctattaagtattcaatagcattttatctaaagaaaaaatgtacataccttagtataaaaatcctttattgctaaaaatgctaatgatcatctgaaccttcagcaagttgtcatctttttgctagtggagggccttgcctcagtgttgacatctgctgactaatcagggatatggttgctgaaggttgggatagctgtggcaatatcataaaataagacaacaggctgggcaaagtgactcacgcctataattccaacactttggggagccaaggcaagaggatcacggcagccaggggttcaagaccagcctggacaacatagtgagacacccccttccctacaaacaaatcagccaggcatagtagtacctgcctgtagtcctaggtacttgggagactgaggcaggaggatccctaagcctgggaggctgaggttgcagtgagctttgatcataccactatactccagcctgggcaacagagagagacactatctcaaataaaataaaaataaaatgaaatgaaataataaaataaattttaaagcttgccacatcaatggactcttcctttcatgaaagatttccctgtagcatgtgatactgtttgatagcattttaccatggtagaacttctttcaaaattagtccattcatctcaaaccgtgccactcctttatcaactaagtgtatgtaatattctaaattatttgttgtcatttcaacagtgttcacagcatcttcaccagaagtagattccatctcaagaaaccactttctttgctcatttgtaagaagcaactcctcatctgtttaagtttaccatgagattgcagcaattcagccacatattcaagttccatttcttttttaaccattttaaattttatgttttttattgaaaatttcaattatgcatattcatggggtacatagtgatttttccataaatataatgtatagtaatcagatcacggtgattagcatatccattatctcaaacatttagtatttcttcctgttgggaacattcaatgtcctctttctagctctttgaatctatgtattattttcatctatggtcaccctacagtggtaaaaacactagaacttatttctcctatctagctataattttgtatcctttaacagtaaatcaagttctctttctatttccactgcatctgcagttacttcctccactgaagacttgaacccgtcaaagtcatccctgagggctagaatcaacttcttcaaaactcctgttaatgttgacactttgacctcctcccatgaatcataaatgttctcaatggcttctagaatggtgaatccttttcaacttactttgcccagatccatcagaggaatccacatctatgacagcaatagccttacaaaatgaatttcttaaatcgtaagatttatggggtgaaaagaagttggtgaatacatacaaaaatacaattagataaaataagttctagtattcaataatacagtagggaaattatagttagcaataatttattatatatttcgaaatagctagtgggggttaggggaaaaaaatagctagaggaattttaatgtccccaacacaaagaaaagataaatgtttgaggcaatggatatcccagttgtcctgatttgatcattacacattttgtatgcatgtatcaaaatatcacatgttccccataaaaatgtatcactatgatacatcaattaaaaatacaaaaataagtaaataaatgagatgaaggtcgaaattactccttgatccatgggctgcagaatgaatgttgtgttagcaggcatgaaagcaacattaatcttcttgtacatctccatcagagctcttgggtgaccaggtgcattgtcaatgagcagtaatattttaaaaggaatctctttttcagagcagtaggtctcaacagtgggcttaaaatattcaagaaactatgccgtaaaacagatgtgctgtcatctagtcttttttgtttcacttatagaacacagtagatttagcataattctcaagggccctgggattttcaggatggtaaatgagtattggcttgaacttaaaggcacaagctgcattagctgctaccaagaaagtcagtctgtcctttgaagctttgaagccaggcattgacctctctctagctataaaagccctaggtggcatcttctgaaataagactgtttcatctacatggaaaatctgttgcttattgtagccccttcatcaatgatcttagcttatccgatgatcttagatcttctgggtaacttgctgcagcttctacatcagcacttgctgcttcaccttgcacttttatgttacagagatggcttctttcctcaagcctcatgaacaaacctctgctagtttcaaacttcttccatagcttcctcacttttcttagccttcatggaagtgaagggagttagggccttgctctggattgggctttggcttaagagaatttgtgactggtctgatcttctatccagaccactaaaactttctccaaatcagcaataaggttgttttgctttcttatcattcatgtgttcacggaagtgacacttttaatttccttcaagaacttttcaggcaggtgcagtggctcacacctgtaatcctagcactttggaggctgaggtgggtggatcacttgagttcaagagttcgagaccagcctgggcaacatggcaaaaccctgtctgtacaaaaaattaaaacaaaattagccaggtgtggtggtgtgcacctgtagtccttgctacttgggagactgaggtgggaggatcacctgagcctgggagtttgaagatgcagtgagccaagatcataccactgcactccaacctgggtgacaaagcgagattctgtctcaaaaaaaaacaaaaacaaacaaacaaaaaatctacttagttatagtcacaacttgactaattgttggcccaaaaggcctagctttcagcctatctcggcttttgacatgccttcctcaccacacttggttatttctagcttttgatttaaaagtgagagatgtgggactcttcctttcacttgaacacttagagaccactgtaggattattaattggcctaatttcaatattgttgtgtcacaggaaataggaagacccaaagagagagacatgggaaatggctggtcagtggagaagtcagaacacacataacatttatcaattaagtcagcttctttatatggatacagtttgtggcaccctaaaccaattacaataataacataaaataacactgatcatcgctctccataacagatgtaatatgaaaatctaaaatattgtgagcattaacaaaatgtgacgtagagacatgaagtaagcacatgctgttggaaaaataatgctgacagatgtgctcaatgcaaggttgccacaaaccttcaatttgtaaacacacattgtgtgcaaagcagaataaagtgagtcacaataaatgagatatgcctgtacataaaaatccagcaaatttggaataaactaaataactgcaaaactaacttaccttaccagacaaataacatcatctactgctggggacaagttggtatgctttgctcttgagcataacactcataaaaatatccatggatagtcttaggtggaaagttcccaagtaaaggagtttctatgcatatttaatctcattctacatcctgttttttgagcagaagggctcttatttttatctgtgttaccagtacttcccactgtgcctgacatgttgtgggcaataaacatttgttgaaagaatgaagaaaaatggaaagtacaaatgtacaaatttataccctgaagaccttgtttttctctgtgcactctgaaatatcaccactgggaggcagcacatgatttaataacagcttatctcccctccgaagaagacacacttaaatgatactatatttataaacatggtggttccaggcatttcatagttacaaatagaaggaaaagatgatattctgacctttaaagatactactttaatgtctctaaggccagttatgcgttcaatattatctcttcctgcagcttcaaaacatctaggtataataataactctgaaaacgtatggaaatgagttctcaataataattagatgctattgtggctgatgagaattaactgaaattattgttaccatctctaactgtcataataaaaagacatgccttgtgtttatctaggtaattcaaagactggtcagcaagcaaatttgcaagatgtttttaagaaaaaaatgaatttcattaaagagtaaatatgttctaactttttcttttctttttctttttttttttttttgatggagtcttgctctgttgcccaggctggagtgcagtggcgtgatctcggctaactgcaacctccgcctcccaggttcaagcaattctccggcctcagcctctcaagcagctgggactacaggctctaacttcttaaataatttttttgtctttttcctgcaaataatcagaatgcatactattggattagcatggtgcatttccagtgtcagccaggtacaaataaggaggattacttttgttattctggaccaatttcatgcagctacttctgtatgcaggctgtctgtcctcagcaatagcacatgtggtttcagatattcactgtatttttcattgaattacaagttgttactcttccatctgcaataatattagttagtttgttaagtgttctcaccagtggtttacgccagactttcttttattacattacttttcatctacctttctttctaaaactttataactctctgggacacgttttgccaattgaatttttttctccataaatgccagcaagctggtaaaacacatagacagcaagaatattttttatatttaaaaaataaaaccgtagcattcactttacaatgagatcacgtgtctagaagggttgtcattgtaaactagggaaagtctgatgacagacaactgaaacccatccatgtgtaatattgtgatatataccccaaaaatgtattgtgccaggtatatggcactggtaattaaaattataaatttactttttgggtatctcacatatttatctttaaagatttcaaaggatttgagtgaagctgtttatcaatagaaaatatgcccaggtttttctaaaccagtattctgaactgatattggcaattccccaattttaaaacataaaactgttttatttctaaaaatttgccaagctcatattctggtttaatgctatttgcccatacctgcaagcattttaaatattttctcttttccttttttcttttctcaaggaataaatatcttattttttctattcaacattttccttcttttttgttctctccctttttctaacccatttcattctaatgtgggaactatcagatctcagatttttataatacaggttttaaaaagtaaacatttcctatacttttttatgatgttatagtcttaattgatgcacagtcagccttccaaggcacagaaagcaatagactaattattttacctctgcatgataagaatttccaggcttcacatgtcctcacttatcagtgggagctaaatgatgagaattcatgaacacaaagaggggaacgacagatactggggcctacgtgagggttgagggtggaaggagggagaggagcagaaaagataactattgggtactaggcttaatacctgagtgattaaataatctgtacaacaaactcccgtgacacaagttcacctatataacaaaccttcacatgtaccccctaacttaaaataatagtttaaaaaaaaaaaattaccaggtttccagcaaaatatagaaaatttactcctcaaagccccagttcctctctaaaactaattccaagttttatgggtttttactggtttttgttttgttttgttttttgagacagagtcttgctctgttgcccaggctagagtgcaatggcatgatctcagctcactgcaacctctaccttcctttcgagctgtgcttgtgcctcagcctcccaagtagctgggatctcaggtatgtgccaccatgcccagctaattttttaaaatatattttagtagagatggggttttgccatgttacctaggctggtcttgaactcctggcctcaagtggtctgcccacttcggcctcccaaagtgctgggattacaggcgtgagccaccactgccagccccaagttttatgatttattgattacttgtagcatcccacttccaggtagcaaactctgcattagttagactttctatcagatctactgctgcatataataataaacattagtttaaacaaaatagaaatttatttttctcttacataaaataagtctgaagagaggaagttcagaggcttctttcttatctgtaatctgcaaggtcacctcaagacccaagatagtgctgagctctggaatatccacattccagtcacaaagaagggtcaaaacaggctcctataggctgcattagttcttttgaggaacctctcagaatttccacacaacagttccacttacatctcattcactcataagccacataggccacaatagcacaaaaagagactgagaatttgtctttagtctgcacaggaatattcctacaaatgtaggattctgttaccaaggaagaaggaaagaacaactttagaaagtaaataagagtccctgacacgatgttcattataattttctttataatagtagaatattggaaatagcctaaaaggcatggatgatacatggttaaatgaaatccagaatgtgtatgtattaagtactgtcttgatatttaaagtattgtttgctatttattgacatggaaagttatccatgatacattttaaatttttttaaagcatctataatatgagcccatatgtaaaatcaaatgtctgaaatgatttttgttaatgttaacaggggttagagaacaactgaggttaataattttttgtaattttactttcttctctatgtttttctgtatgttttgaatttgtaaaatgagcatacactgtttatatgattcctatggaaataaaagggcactgaacaaatttatctacaataactcaaaaaaagtcaatctgcaaaactttctatttgcacaccaatcttcaaccagtgggatttttaagctgcccttatgacatttaccagtttcataatgataataatattaagtgcactgattgtcaatcttcagtaactgatagtgaagacagtttataaaaatccttatttgcttttttgtcttggaattttcactccagctaatttgagttttgtaccacctcttcttctccatgaatttttaatatggtgttcagtagaaaagaaattgagtttttatgaataccttctgtattatgcaagtaagttttaattgcagtgattaattatttcattgtccctattttcattctgtctgttataatcatacttgggactttgtcactaagaggtaaacaggacatttgaaatctgtctgccttttatacatgtacattaagccctttgcctcattccctttatctctgaaatgggtagaataatgaatcttttacttacctcaaaggatattgtgaaagtaaaatgagataatttatgggaaatgttttacaaagttaaaagtagcatatatagtaatggagcagactgacttatcttagaatcaaggggtttatgtaacattgggttttttaagcagcagtaatcatctttggtattgcccacaacacctgcagccagtgtggccaaacaggctggttgctacttcaaagggcagcagtaaattgaggaaggcaggtgttataagaataaagattaagtcactcatccagaaatccaccatgaaaaaagcagccagaatttcttccatcattttcttgggctgagtgggtaaaccctaatttatcatgtaagttgtattgcattaaaggatttttaaaaatagattacccgtgattttcttaaaatatcgatttgcaagaagttcattaattccaaacagcgtagaactaagtattttaaattccttgcaagaaaaaagatccccaaagattaagagcaaatatctattttttatttaattaaagcaaaaacatagcctgcttagaaaagtggtcactctgaacacacacacacacaaacacacacccacacacacacacatgctattatatcctcccctttgaaatgacatctgtcttaaagttcattttcacaggtggagaaaattgagggtgcagcattctgagactgtcattagttacagctgaatttcctctgaactaagttgaattaagtagtgctggagagacagtggggcctcctctttgcttgggtctcctgtttagcaccaggataagctcatattgccttgataacgaaaccaaaaccctttttcgatgttgaaaaggccgattgatgcttattaatgtattatagttttggtgaattgcggtttcctctaccacgtagatgagtttctcatttttctttttcatactaaagggattttgtgaactacatataatagtgaactctttataatactccatgtgtatatagagttgtcttccaacattttaagcttcctcatatgtcccccagccctgtttgtgagctttatctactttgaggagaggctttatatcagtggtggagatgcgattggcaatggattttgaagtatgtactgttaccccatacacatacatcaacccaggatcgctttctggataatttgatgacctgggtaactgccctgggcttcagccatcacattgagacctgctccaaataattcctctgcatcttaatatttccatctctaaaatgttttggactttcaatatgccactaggatatttacataagacttacttgaaattttctgagaaaacttcatctttgtaacattttagcttaaagcaatattgtattttgttattattgttataataatgactaaaatttgttttctcccttgtttttagttctatgagtactgtgtcttatatggaagaacccagtcagcgtgatgatatctctcgccttacagttcagatggaaaacacctatcagttgggtgtgttcttttatctctcactcctattttaaacttctaaattggtgactgattctcttaaaaatgatatttgataacctggcattgtcttcaattctagcacaatataagggactttaatgaattgagtgatttgatgttgctttagtttcttcctcagcaaaaaggtaacaacacttgctgtcttacttttctttactaatgtttcccaaatgccaaacaattcactgggtggcactgatgcatacagtatactactgacttaacaaattcactgagtatttctgggtacatagatatgacttaaatgaaagagataagtattgatattttatccaacaaaaccaatcagtgttgttaggtgaaggaaaaaaaaaaactcaaagcaaaggcaaatgactcatagtcccctgttgacagagacgtttatccattaccactgaggttttgagtctttgaaaacaaagatctttgcacctgccgctatactcccaggtggagtccgtggcaaatatcttttcccatccatgtttcctcatagacccacttgttttctctaaaagcgtacctgcccactattacctgaattcatacataattactgctatatggaaattccacagagatttaccaaggggcaaagaaagactctatgggccaaggtgattccatctgtggccagttaaccccaagaaaattatagaccatcagcctgtcccctctggccttgtagccagttttctacaggagtccccaagactacatggattacacggctccataattagccaatctactggtattttcacagtgcctgtggtggacagctaatattcctgccatccaatatacttttatacttctctggtaacctcactaaatttcctttgaaattccaccaacatcaccacttttgatcctagcattctaatgaagctggcactggctttatagatagagcagtgactgattctaggatggcatataaccatggtgaatccaatcaaagactttgagattaaattcagaaaatgttgtttggcctgttgcagaagaacataaagccctgaaacttgaaggaatgtaggggctctggcaggatctgccaccttgccctgacttgaaactgagagaaaacaacagaatcctggtgtcatcatttgagtcctaaatccaattggctaccctttaacttttcagttaggcaagctaagtttgggtcaggttttccctcacttgcaactaaaagttcttagccatggggtgtctatgactttgaactgtgcatgctggaagggtttgaatcagatttgaacaagacagggccagtgaaatgtgaatctctgtgtttctacataaggatattttttgcaacttgttttctcaaataaagcatcttatcagttttagaagtactgagtatgaaccacattagaaaagtaattttagaaaaagcttagtatagatgaaatatacctgtattttcctacaatagtctatgtgaattttttaataattaaaatattttatgcttgacaattccctttttatagcattcaaccagccattttattaatacttaatcaaaactgtgtttccacttctacttgtttctgggtttatttcacatatgaaaggtattttgtgagtgtattagtccgtttttgcattgctataaagaaatacctgagactgtaatttataaagaaaacaggtttatttggctcatggttctagagactatacaggaaacgtggtgccaacatctgcttctggtaagacctcagtaagcttttaggcatggcagaagggaaggagagttggcatgtcacatggcaagagagggaacaagagaggtgccaggctgttttaaacacccagctctcatgtgaactaatagaggaagaactatagagcaagaactcagtaattaccgctgggacagcaccaagccattcatgagggatccaccttcctggccccaacacctcccaccaggccccacctccaacactggggatcacatttcaatatgagatttgaaggggacaaatatccaaactatatcagtgggactttggtaaatagtttatcatatctttacaatgtaatactggccagaaaagtagagggaaatatcagccaatcaccagcactattatgtttaattaatttttcattccattcaataatgtttgcctcatctaaacacatcttaaatgagagcatttacataaataattacagctacaaaaaatgagatgaaacatgagtatcattcatgagaggagaaaagggaatagaaaaggaaagtgtgtttcttttaataaaataccatttatatatttctcattaattactaaaacaaatataaaagaaaatgcaggctgtggcatctgtcgtatctgaatttgaatactaattttgctaattccttgagcaaggtatttagcatcattgaatctcagtgtcttcacttgtaaatagggataatagtctatacatcacatggatgctatgagactcaaatgatgttatatgtttaaatctctccattcatcatgttactactcctgaaagtgactgactcaaggaccttactatagatcactaagaataaaagccttccatgatattcattgtaacttcatattaattatggaataagttttccacaggactttttctggaactgagtatagtggcacctggttgtttgcaaacatggactgcgagcaccgagccaaactagattggcggccatctttgctaccacatcaagacagcctgccttgagaatgaagccagcacagtagaaagtagatccaaaatattgagagagaaagagagagattatttgagttcagcttccatgaagtgctcaggccctgtctctatgtcaggttttcttagagcctgtcaatctctcagcattgattttacaccaccacatggggtccttcctaatcccacaggcctcactgtctccagacttacgtcctctttcatcttgctgccttctcagcaaggtaaatccccaattcttccttcagcatgcaataactacaataacagcaataacactaataagatcacatatctaaggagtgttttattgtgtgacaagcactgttctaaacatattcaatttattgtctcatttaattctaacaaaaaaaaatgtagtaattattattattaccccaatgtggggtagtggaggcccacatacattaagtaaacttatctttatctactttttaaggacaagttttgtttgtttttaaaattttttttgtcttgatccttcaggtctttgccttttgatttctaaaacacgttttttctcctaaggaaaaaaaaaatctcgagaaagaagaaaagctttgccattcacatcagtttactctgaaactagttttaggagcttatttcagaagtcagaaactgaacattgatggatgattctggatgtttaggggaaaggtaacaaagaagtaagaaaagaatacttcattaccatatttcaaagtattttcaaaacaggatctggttaatgactttttttttaatctaagcgaagtatggaaaggacattggtagcactgtacaacgggaactactggaaacagactcaagtgccaccaggaccctctttccagcactaacctatgtgcactttcttctcttttggtggcctggcctccttaccaccatgaaaaacatgtcctccagcaggtcctcagagtcacatggtaacttttgccaccagaaagaggctgactcttttttcctacttgcagtttaaaataaaaattccaaaaaaagactctcattgtcctggcctagagcattgtcaccctgggttaatcaaccatgccctaggcttgggttcgcaggagatgatggggagatctttaagaaccactttacctatctagattcaatctccacccccacccttccacgatttaagtggaattcaacaatttctatattatcatcaaaataaaaataacgatttatagaacctcaagaggctcacctaactgaactgcagtcagaggctgtaaccttctggttaagttcagccagtgggaaacctcagctgagaggcagagggagtgagaagtgtgaggtggagctgtttatttccctggctcctgcctgtgagttcatcacagcctggttacattcttcaaccaaaggacagaaactgctcccaagggagccctctccacatgacccttctgggatctattaaaagctcttcctctattccccaatcttggggtgggaggggtgggctgacaaccttactttcactggctgaggggtgctgcactatcccttgtgattttctacagcccactcagaacttcctcctggaattattttaactatagggtgccatatgtttcatttgaccctgacagatacagtcatcacaaacaaacacttattactagatattgacatatattaaaagagaattgaatagaattcttgatctcattccttcatctttatcaattcaacaaataatgactgggcttctgtatgccaggccctgggcacatgttcatgtcatgcaatgacattagtatatgaccaaagtgatgatatggctaatattcctgggatgcaggaggaagaagattcatttgaagcttctcctctgaacgtggatgaaatgtggtcgagaatataagctctagcatcagataaacctgggtgtgcaccccagctctgcctctctgtgtgattctgggcaggttactcaatgtatataaatctctgtttccccacctgccaaatggagataacagtgagattcacctcagagatctattggaagactatataaggtaatatgaagtgcttatcgcactgcctgacatgtagcaacggcttaataaaaagtattcattattatatatgtatacaatatacagtcatatatcatatataatgattatctataaaatttaattctatttaaattcagaaatcatacattaaaaatttcttatgcctttagcattgtattagactctgaggaggataaaatccgagcttgcttaccatttcactggaaacgcaggtatgctttagccaatatcaagtggattaggagccaggatggcagtggggacccagtgcatggaaaggagggacatttttacctgagaggaggtagagtgctacctggagaagaagacatttgagatggtcttgaaacatgagtggctgtttctcagatgaacaagatggggaaagatattccatttgaaaactaaagagcaagagtaaggacacaggagcacctttatagacagatggagcctgtgaggctggagcagtccacaagaggggcactgtggtagcgggagaaggggcagtagggaatcacactttagacctcgctaaggggaatgtcatttaagatctggtagatagattggagcgggagatataagaggtagagagccagttataaagttgttgagactttgaagtatgtccacaacaatggggcctgggaaggaagagactttcaaggtcaaaccccagcagtattgaacacacttttgagatagtcacgtaaatgtacgaaaatattgtcttcttgttctctctcagagcacttgacaggaaacctaattagagccacttgtttctttcaatagagtccacccagaagattaaatccctccatgtttccatactcttttgattagcctatggggtgggtgggtgtgatttgaaattactttttagaaataaattttatgtgtattttcaggtcctcccaaacattttcctgtggtcaccgtcaatcatattttgaaagatgtagtaaccagctatctacaagtagaagaatatgaaccagagctctgtagacagatgactaaaaccatttctgaggtacgtgtgtgatttgcccaaagtgttaacaatagctagaatatttgctaaagtacaacggaccctctacttttttgatgaggggaattaatttgcagtaacagttaaaatgcgtatttataattaggtcatattctacatatatgtgtgtgtgtgggtgtgtgtgtgtgtgtgtatatacataaagcctttgtctaaaacaatcatgagcatcatttgcatgcattatgtaaaagtgtataaaactgccccatttataaaagtgtttattgtaaaagatacaacattttaatgattattttctcttcactaaggcagcttctttgagtgccatcaaatacagacattgtggtcttcaagcacatttctatttttacaaaccccagggctgcacttcatcaaggtttcctctactttctttttgataacaaactctttaataaacattaatgattagttatattacaggagactccagatgtatagtttcttaattagacatgaacaagacagtgtaactccaatgccaacattctttgacatgaagccatcttaacataaattttcaaagaatgtaatttattaaattctgtgttctggattataattatttcatgtatcttagaaaaggttgatttattgctggtgttaaaattttgttcctgaatgttctatctcaaggggaccatgcttgaagggaatcatacttacggttctaaaacaatcactgaaagtatctacaatgcatcatgctattaaattaaatcccttatatttataacaaaggttaatgcttttgagtttcaatgtagctgaatgaagaccctccctttttttaaatttctaggttattaaagcccaggtcaaggacttgatgattccacggtataaactaattgtgattgttcacattggacaactgaacaggcagagcatacttattggaagcagatgcctctgggatcctaaaagtgataccttttcatcttatgttttcagaaattcttctctcttcgctcttgcaaatgtctatgcagtttaccttgagtgattgaaaataagaaatctagctcttacttttgaaaattctgaggcaggctgtatgtctgtacacaaaagttttactgccaaaaactttgagaaagaaacaacactgatatttcaagcaactggaagcttttgaattttttcatattctagtaaagatttggggaggggagggtagccacagaaagaatcttgtttatctaaagcaggaacttgatcttggttttgctggattgctttccatagacatagattcttattaaatatttgttttggtactaattattttaattattctttaattagagtgttacaatttcctgcattgttttttaataaaaagaagctttagaaaaactatggctatataccctgaccaataaatgatagtagaatattcaacatggtatacacaaatgataaataatgtgcctcagtgctgcatataaaagaatactggttttcattttgtacttaataaattgagcagcattcattaagtgcaattattgttacatgtacctgacagttgaaactgctgaggtagaattaatggcttcataacaattatcgtggtcccacgggctgcaagctaaaactagaagctcttgtggcttgcctgcactttacacaattgtgggagaaccgaaagttggctcttcagtaatggaaactataaagtgaataaaggctttttgggacactgaagtagacattgtgatattaaatatacatgatgcttaatactaaatgtgtctgtaacacataaaatcatttattggaaagagacattgcttttaaatatcctaggctaacaaactttttcacaaaatatatggctggcaccttaacaaataaagcatgtgtagttaccattttactcctatgaatttaatactaaagtgacccagtgaggtttttgaatagacgggtgctaaaatttacagggctgaaatagcttattattctgctggttaatgtatcttacgccacggatcatttatttttatgaagctttcaagtctttgtgtgcaagtaaaatgatgttgtggcgttgttcttggatggtaagtggactgcctagaggacatttgttaaaggtcaaagacaaattgtacacatatggagaaaattagcaatgctgtagtcttaaggaaaaaatgatttatcattcatatcaaaaagagtttagcaaatggaaaaccagttaatgctttaattttaaaatgttttggtgtcttacttttccctaaaaatgacatgtagtaaaaaatggatacttttaaaatcccttcccttctgctattttctggcttttaaagtgattattcaaaatgaatttgtcaattttcacttttttttttctgttagtgcattagtgggaatatgtctatgtaataatttatcacaaccaatatttgtcaatctccatagaacagttttcaatctggattagattacacgtataacaagtaaatgagcttcatattttcattacacattggtgaacatctcccttcgtggaacaacagcgggggtaatcatatcactaattttgtatgaataaatgaaaatgaagaaacttctttaacatatacaaagtctattgtaacaatgactgtttgttttagagttctaaattctaatccatgagataatttcttactgtcttccccaggctgtgttgagaatcgaaactgcaaaacatgacggcagttaaaaaacaaaaaagaaagcagtttgccagcatattgctacacactgtaattcagatactcagtgatgaattctagcaattatatagcagtataagaatacatagtaaaaactcactccttgcaactaacttgggagaagctagttatcacacagaactttatcatgagaaatttttaatgaaattatcacacagaaccttatcatgagaaatttttaaaacaatgacactataaatttgaaggaattgttttactttgaaatgccctgaacttccctggtatttttttcctctcctaaagtgccatccttcttcccagaccagccatgcccatccctgctccagagccttcactcatgctttcctaccttggaacaccccctcccacttaagccactttcttcgcttttcagggtcacattcaggtcttaccttttctctcagtccttctctattcactgcttgcctcctgctctctctctcctctgattattctcgtggttgagctcttgattgttctctagctaacttttgaattctagttttgtttcccttactattaatagactgaagacatattgaggacatggaccacataacttgacagtgcctagaaataaaaatcatttttacttttaaagttatcattatgtgcattgcactgtgctacataactcccagctgcatagataatagcaaacacagttcaacccctgaggaactaggatcctataggggtgaaaagagaagtacacaagtgaccacagtataggctcaaatatgttgtcataagaaaaatccagaatatatttatccaattaacagaatcaaggaagccttcatgaaaggaaagaaaatttaagctagactgtgatggagagattagaatttcaacaggcagaagattacaggaagcctaggctggataaaacacagtgttcacgaagataagtggttagaactaagattagaaggaagatggccaaataggaacagctccggtctacagctcccagcgtgagcaacgcagaagatgggtgatttctgcatttccatctgaggtaccgggttcatctcactagggagtgccagacagtgtgtgcaggacagtgggtgaagcacactgggtgcgagccaaagcagggcgaggcattgcctcactcgggaagcgcaaggggtcagggagttccctttcctagtcaaagaaaggggtgacagatggtacctggaaaatcaggtcactcccaccctaatactgcgcttttccaatgggcttaaaaaaatggcacaccaggagattatatcccacacctggctcagagggtcctaaacccacggagtctcgctgattgctaacacagcagtctgagatcaaactgcaaggcagcagtgaggctgggggaggggcgcctgccattgcccaggcttgattaggtaaataaagcagccgggaagctcgaacttggtggagtccaccacaactcaaggaggcctgcctgcctctgtaggctccacctctgggggcagggcacagacaaacaaaaagatagcagtaacctctgcagacttaaatgtccctgtctgacagctatgaagagagtagtggttctcccagcatgcagctggagatctgagagcgggcagactgcctcctcaagtgggtccctgacccccgagcagcctaactgggaggcaccccccagtaggggcagactgacacctcacatggtcgggtacttctctgaaataaaacttccagaggaacgatcaggcagcagcatttgcagatcaccaatatccactgttctacagccactgctgttctacagccaccgctgttctacagccaccgctgttctgcagccaccgctgctgatacccaggcaaacagggtctggagtggacctctagcaaactccaacagacctgcagctgagggtcctgtctgttagaaggaaaactaacaaacagaaaggacatccacaccaaaaatccatctgtacatcgccatcatcaaagaccaaaagtagataaaaccacaaagatggggaaaaaacagagcagaaaaactggaaactctaaaaagcgagcgcctctcctcctccaaaggaccgcagctcctcaccagcaatggaacaaacctggatggagaatgactttgacaagctgagagaagacttcagatgatcaaactactctgagctacaggaggaaattcaaaccaatggcaaagaagttaaaaactttggaaaaaaagttagatgaatggatacctagaataaccaatgcagagaagtccttaaaggagctggtggagctgaaaggcaaggctcgagaactacgtgaagaatgcagaagcctcaggagccgatgtgatcaactggaagaaagggtatcagtgatggaagacgaaatgaatgaaatgaagcgagaaggaagtttagagaaaaaagaataaaaagaaatgaacaaagcctccaagaaatatgggactatgtgaaaagaccaaatttacatctgattggtgtacctgaaagtgacagggagaatggaaccaagctggaaaaaactctgcaggatattatccaggagagcttccccaatctagcaaggcaggccaacattcagattcaggaaatacagagaatgccacaaagatactcctcgagaagagcaactccaagacacataattgtcagattcaccaaagttgaaatgaaggaacaaatgttaagggcagccagagagaaaggtcaggttacccacaaagggaagcccatcagactaacagcagatctctcggcagaaactctacaagccagaagagagtgggggccaatattcaacattcttaaagaaaagaattttcaacccagaatttcatatccagccaaattaagcttcataagtgaaggagaaataaaatcctttacagacaagcaaatgctgagagattttgtcaccaccaggcctgccctaaaagagctcctgaaggaagcactaaacatggaaaggaacaaccagtaccagccactgcaaaaacatgccaaaatgtaaagatcatcaaggctaggaagaaactgcatcaactaccaagcaaaataaccagctaacatcataatgacaggaccaaattcacacataacaatattaactttaaatgtaaatgggctaaatgctccatttaaaagacacagactggcaaattggataaacagtcaagacccatcagtgtgctgtattcaggaaacccatctcacatgcagagacacacataggctcaaaataaagggatggaggaagatctaccaagcaaatggaaaacaaaaaaagacaggggttgcaatcctagtctctggtaaaacagactttaaaccaacaaagatcaaaagagacaaggaaggccatcacatagtggtaaagggatcaattcaacaagaagagctaactatatatatgcacccaatacaggagcacccagatttataaagcaagtccttagtgacctacaaagagacttagactcccacacaataataatgggagaatttaacaccccactgtcaacattagacagatcaacgagacagaaagttaacaaggatacccaggaattgaactcagctctgcaccaagcggacctaatagacatctacagaactctccaccctaaatcaacagaatatatattcttttcagcaccacaccacacctattccaaaattgaccacatagttggaagtaaagcactcctcagcagatgtaaaagaacagaaattataacaaactgtctctcagaccacagtgcaatcaaactagaactcaggattaagaaactcactcaaaaccgcttaactacatggaaactgaacaacctgctcctgaatgactactgggtacataacgaaatgaaggcagaaataaagatgttctttgaaaccaacgagaacaaagacacaacatacccgaatctctgggacacattcaaagcagtgtgtagagggaaatttatagcacaaaatgcccacaagagaaagcaggaaagatccaaaattgacaccctaacatcacaattaaaagaactagaaaagcaagagcaaacacattcaaaagctagcagaaggcaagaaataactaaaatcaaagcagaactgaaggaaatagagacacaaaaaacccttcaaaaaaattaatgaatccaggagccggttttttgaaaagatcaacaaaactgatagaccgctggcaagactaataaagaagaaaagagagaagaatcaaatagatgcaataaaaaatgataaaggggatatcaccactgatcccacagaaatacaaactaccatcagagaatactacaaacacctctacgcaaataaactagaaaatctagaagaaatggataaattcctcgacacatacaccctcccaagactaaaccaggaagaagttgaatctctgaatagaccaataacaggatctgaaattgtggcaataatcaatagcttaccaaccaaaaaaagtccaggaccagatggattcacagctgaattctaccagaggtacaaggaggagctggtaccactccttctgaaactattccaatcaatagaaaaagaggaaatcctccctaactcattttatgaggccagcatcatcctgataccaaagcctggcagagacacaaacaaaaaagagaattttagaccaatatccttgatgaacattgatgcaaaaatcctcaataaaatactggcaaaatgaatccagcagcacatcaaaaagcttatccaccatgatcaagtgggcttcatccctgggatgcaaggctggttcaacatatgcaaatcaataaatgtaatccagcatataaacagagccaaagacaaaaaccacatgattatctcaatagatgcagaaaaggcctttgacaaaattcaaccacccttcatgctaaaaactctcaataaattatctattgatgggacgtatctcaaaataataagagctatctatgacaaacccacagccaatatcatactgaatgggcaaaaactggaagcattccctttgaaaactggcacaagacaggggtgccctctctcaccactcctattcaacatagtgttggaagttctgaccagggcaattaggcaggagaaggaaatgaaggcattcaattaggaaaagaggaagtcaaattgtccctgtttgcagatgacatgattgtatatctagaaaaccccattgtctcagcccaaaatctccttaagctgataagcaacttcagcagtctcaggatacaaaatcaatgtacaaaaatcacaagcattcttatacacaaataacagacaaacggagagtcaaatcatgagtgaactaccattcacaattgcttcaaagagaataaaatacctaggaatccaacttacaagggatgtgaaggacctcttcaaggagaactacaaaccactgcacaatgaaataaaagaggatacaaacaaatggaagaacattccatgctcatgggtaggaagaatcaatattgtgaaaatgcccatacagcccaaggtaatttatagattcaatgccatccccatcaagctaccaatgactttcctcacagaattggaaaaaactactttaaagttcatatggaaccaaaaaagagcccgcatcgccaagtcaatcctaagccaaaagaacaaagccagaggcatcacgctacctgacttcaaactatactacaaggctacggtaaccaaaacagcatggtactggtaccaaaacagagatatagatcaatggaacagaacagagccctcagaaacaatgacacatatctacaaccatctgatctttgacaaacctgacaaaaacaagcaattgggaaaggattccctatttaataaatggtgctgggaaaactggctagccatatagagaaagctgatactggatcctttccttacaccttatacaaaaattaattcaagatgtattaaagacttaaatgttagacctaaaaccataaaaaccctagaagaaaacctaggcaataccattcgggacataggcatgggcaaggacttcatgtctagaacaccaaaagcaatggcaacaaaagccaaaattgacaaatgggatctaattgacctaaagagcttctgcacagcaaaagaaactaccatcagagtgaacaggcaacctacaaaatgggagaaaattttcgcaacctactcatctgacaaagggctaatatccagaatctacaatgaactcaaacaaatttacaagaaaaaaaacaaacaaccccatcgaaaagtgggcgaaggatatgaacagacacttctcaaaagaagacatttatgcagccaaaagacacacgaaaaaatgctcatcatcactggccatcagagaaatgcaaatcaaaaccacaatgagataccatctcacaccagttagaatggcaatcattaaaaagtcaggaaacaacaggtgctggagaggatgtggagaaataggaacacttttacactgttggtgggactgtaaactagttcaaccattgtggaagtcagtgtggcgattcctcagggatctagaactagaaataccatttgacccagccatcccattactgggtatatacccaaaggattataaatcatgctgctatgaagacacatgcacacatatgtttattgtggcactattcacaatagcaaagacttggaaccaacccaaatgtccaacgatgatagactggattaagaaaatgtggcacatatacaccatggaatactatgcagccataaaaaaggatgagttcatgtcctttgtagggacatggatgaaactggaaaccatcattctcagcaaactatcgccaaggacaaaaaaccaaacactgcatgttctcactcataggtgggaattgaacaatgagaacacatggacacaggaaggggaacatcacactctggggagagttgtggggtggggggaagggggagggatagcattaggagatatacgtaatgctaaatgatgagttaatgagtgcagcacaccagcatggcacaggtatacctgtgtaacaaacctgcacattgtgcacatgtaccctaaaacttaaagtataataataataataaaatttaaaaaaaaagaactaagattagaagaatactttgtgagtgtctgggtaagaaaatgagtaatcattaaaggtttttcattaggctaacagtataaatgaacggacgctctaagaaaatgaatatgttggaaaagaacagaaagactctttggggaggtgagaggtaatagaggctggaagaggcagtggcattggaaatggaaaggagaggacagttctatgagacactatgggggcaaggtctacatgagtaggcaaggggaaagaggagtcagaagtgaccccaacacaatatgaagacagttgaaagtttcgagctctggacatttgcagacatttgtaggtctgagtcctgctgtcccaggcacaagttaagtgacctcaaataaattactaatctcactaagccacagcttcttcattgtaaaggaatgataatactgctacctacctcataggattttggtgagaattaaatacacatgtttgctaaactcttaacatcataattcctaatagaaagctctcaatacagtagctcttaagattgcagttgaaagtttcagtatgggtcactagttcaatggacctattaacaaacataaggaagtcagcagagtttgaggaataaaatatgaaatttgattttgcacttgttgaatttaagttaatgatgggatattaagatggggttagcctccggcagctgagaacatggggctggagctgagctacgacatcaaggtgagagatttagacttggcagtcatccacattgagaccgaacatcctcctgctttataaaatattcattagcagaatcttcagcaagtgtagtgagtactaatagcaaattactaaaaattcagttaactctgggaacataaccagaaaccacccctcaaaaactaataggaaattttttttccaaaactaaaattaaatgatgccttcttttcttcattaaaaaaattcccagatgatccatttatgttgtcagacatcataaaaaatgtaagggttctctcaaaaatacattagcatcttgaatggaggtgtcagtgctgtcatctgctgtcattgttaataaaatggctttaaagaaaatacataataggaggttcttccaacagagtccaacagattatattttgggaaattaagtgctagttcaactcctttatttaaaaaaaactcttaagaattatccagtatatgggaatgattttaaaaacaacaacggttgagaaattagagctcgtaaatgtagccatcctagagaatgaacacactctttgttgggaccatcatttgacctgtgtttctagatattactcaaaaatatattaagaaaactcaatattaaatagttattcataatttactatgcattttgctcccaaaattcttctaaaggagtggcctgcgcccgttacctctgattttctctgccacttctttctatgctactttcaccttctgcaatctagttctcatccccactaatgtgttactttcacaagcagtcaaagtggtcccccaggacaatctgcaaaacatttctccagttgcatccacctcagctatcttctgaattcatttcttttgaatcacgttgtaatatagatggttaggttttggtcgctttcttttcttttttttttttttagcataagtttgacaaaaatctcctttagctgccacccttactagctgtgtgtgactttggtttgcggcggctagtgtcttgagccttagtttccccaaaggtaaagatgattatgattactacttatgttcttgtcatgacgactaaaaggaaaagtatgcatagaatatctggcccactgtagatgcttactctcaacctctaattttttcctgcagaaactcttttctaaaaaattgaacagatatttttgcaatttctgctcactaccctaatgtaataccctagattacattttttcttttatcacctttaatcatctgctgctgccttctttgaatgacaatttcttctcaagtccacatttattatacagtcctgtacatctccaaatttagcttctcgtggctgatgtctacctgtttttaaatgtttcattcggatgtcttaactctcacttcagtaatttcttgattcctttgaacatttctgtttactgccgcctattttatcctgttaattctcatttgaatttatatattcctctagtatgttcacacagaataaacatactaaaggtttatttagacatatatattatctgtttaaagtctcctgtaatctcttcttaatttctttccttgccaatttgagtacacttttgttttttaattttagtgcaggatataacttgagacttgtggttttccacccacccaccagggtatttccccacctagcaaggcaaggaaccagtataaccagtacgggaagcactaagcttcactttacatttgtgatcagaaaagttgcccacggatgatgatgagggtgaatcatctaactattaaaaggacagaatatccagcccgatttgtttaggggtttctgggaaatagttttttaaattcctatgaaaaatatcaagtttaaagactcataatttcatgttgaaactaaaggaaaataaactgtatgttgttggttaattatataattatatttatttttttcctttaaggaaatgtgttatataacaagaactttggtagga

SEQ ID NO: 878 - DNA, 2245 bp, Homo sapiens
gcggccgccggctgaatgaagcctgggacgcgggagccgcgccgcgcgcagtgtctgcagtgccggaggtctgggaggctccgggcgaagcctccctgctgcaggttatgatgatgtcagacaatgctaaaggcagagcagctcattcatggaagaaaagagggagtatttcttctctaagtaatcatgaattttggcgaaaggaaattcatgggcgcatcaaagattctatgagtactgtgtcttatatggaagaacccagtcagcgtgatgatatctctcgccttacagttcagatggaaaacacctatcagttgggtcctcccaaacattttcctgtggtcaccgtcaatcatattttgaaagatgtagtaaccagctatctacaagtagaagaatatgaaccagagctctgtagacagatgactaaaaccatttctgaggttattaaagcccaggtcaaggacttgatgattccacggtataaactaattgtgattgttcacattggacaactgaacaggcagagcatacttattggaagcagatgcctctgggatcctaaaagtgataccttttcatcttatgttttcagaaattcttctctcttcgctcttgcaaatgtctatgcagtttaccttgagtgattgaaaataagaaatctagctcttacttttgaaaattctgaggcaggctgtatgtctgtacacaaaagttttactgccaaaaactttgagaaagaaacaacactgatatttcaagcaactggaagcttttgaattttttcatattctagtaaagatttggggaggggagggtagccacagaaagaatcttgtttatctaaagcaggaacttgatcttggttttgctggattgctttccatagacatagattcttattaaatatttgttttggtactaattattttaattattctttaattagagtgttacaatttcctgcattgttttttaataaaaagaagctttagaaaaactatggctatataccctgaccaataaatgatagtagaatattcaacatggtatacacaaatgataaataatgtgcctcagtgctgcatataaaagaatactggttttcattttgtacttaataaattgagcagcattcattaagtgcaattattgttacatgtacctgacagttgaaactgctgaggtagaattaatggcttcataacaattatcgtggtcccacgggctgcaagctaaaactagaagctcttgtggcttgcctgcactttacacaattgtgggagaaccgaaagttggctcttcagtaatggaaactataaagtgaataaaggctttttgggacactgaagtagacattgtgatattaaatatacatgatgcttaatactaaatgtgtctgtaacacataaaatcatttattggaaagagacattgcttttaaatatcctaggctaacaaactttttcacaaaatatatggctggcaccttaacaaataaagcatgtgtagttaccattttactcctatgaatttaatactaaagtgacccagtgaggtttttgaatagacgggtgctaaaatttacagggctgaaatagcttattattctgctggttaatgtatcttacgccacggatcatttatttttatgaagctttcaagtctttgtgtgcaagtaaaatgatgttgtggcgttgttcttggatggtaagtggactgcctagaggacatttgttaaaggtcaaagacaaattgtacacatatggagaaaattagcaatgctgtagtcttaaggaaaaaatgatttatcattcatatcaaaaagagtttagcaaatggaaaaccagttaatgctttaattttaaaatgttttggtgtcttacttttccctaaaaatgacatgtagtaaaaaatggatacttttaaaatcccttcccttctgctattttctggcttttaaagtgattattcaaaatgaatttgtcaattttcacttttttttttctgttagtgcattagtgggaatatgtctatgtaataatttatcacaaccaatatttgtcaatctccatagaacagttttcaatctggattagattacacgtataacaagtaaatgagcttcatattttcattacacattggtgaacatctcccttcgtggaacaacagcgggggtaatcatatcactaattttgtatgaataaatgaaaatgaagaaacttctttaacatatacaaag

SEQ ID NO: 879 - protein, 177 aa, Homo sapiens
MMMSDNAKGRAAHSWKKRGSISSLSNHEFWRKEIHGRIKDSMSTVSYMEEPSQRDDISRLTVQMENTYQLGPPKHFPVVTVNHILKDVVTSYLQVEEYEPELCRQMTKTISEVIKAQVKDLMIPRYKLIVIVHIGQLNRQSILIGSRCLWDPKSDTFSSYVFRNSSLFANVYAVYLE

SEQ ID NO: 880 - DNA, 1638 bp, Homo sapiens
gcgggcggccgccggctgaatgaagcctgggacgcgggagccgcgccgcgcgcagtgtctgcagtgccggaggtctgggaggctccgggcgaagcctccctgctgcaggttatgatgatgtcagacaatgctaaaggcagagcagctcattcatggaagaaaagagggagtatttcttctctaagtaatcatgaattttggcgaaaggaaattcatgggcgcatcaaagaccctggaagtctgtggattacacatacaatgccttttacaggtgggaaactgactataaaggagtagcaatcccagcacatgtcagaagtaaagctaatttgagttttgtaccacctcttcttctccatgaatttttaatatggtgttcagtagaaaagaaattgagtttttatgaataccttctgtattatgcaattctatgagtactgtgtcttatatggaagaacccagtcagcgtgatgatatctctcgccttacagttcagatggaaaacacctatcagttgggttattaaagcccaggtcaaggacttgatgattccacggtataaactaattgtgattgttcacattggacaactgaacaggcagagcatacttattggaagcagatgcctctgggatcctaaaagtgataccttttcatcttatgttttcagaaattcttctctcttcgctcttgcaaatgtctatgcagtttaccttgagtgattgaaaataagaaatctagctcttacttttgaaaattctgaggcaggctgtatgtctgtacacaaaagttttactgccaaaaactttgagaaagaaacaacactgatatttcaagcaactggaagcttttgaattttttcatattctagtaaagatttggggaggggagggtagccacagaaagaatcttgtttatctaaagcaggaacttgatcttggttttgctggattgctttccatagacatagattcttattaaatatttgttttggtactaattattttaattattctttaattagagtgttacaatttcctgcattgttttttaataaaaagaagctttagaaaaactatggctatataccctgaccaataaatgatagtagaatattcaacatggtatacacaaatgataaataatgtgcctcagtgctgcatataaaagaatactggttttcattttgtacttaataaattgagcagcattcattaagtgcaattattgttacatgtacctgacagttgaaactgctgaggtagaattaatggcttcataacaattatcgtggtcccacgggctgcaagctaaaactagaagctcttgtggcttgcctgcactttacacaattgtgggagaaccgaaagttggctcttcagtaatggaaactataaagtgaataaaggctttttgggacactgaagtagacattgtgatattaaatatacatgatgcttaatactaaatgtgtctgtaacacataaaatcatttattggaaagagacattgcttttaaatatcctaggctaacaaactttttcacaaaatatatggctggcaccttaacaaataaagcatgtgtagttaccattttactcctatgaatttaatactaaagtgacccagtgaggtttt

SEQ ID NO: 881 - protein, 61 aa, Homo sapiens
MMMSDNAKGRAAHSWKKRGSISSLSNHEFWRKEIHGRIKDPGSLWITHTMPFTGGKLTIKE

SEQ ID NO: 882 - DNA, 1438 bp, Homo sapiens
gcggccgccggctgaatgaagcctgggacgcgggagccgcgccgcgcgcagtgtctgcagtgccggaggtctgggaggctccgggcgaagcctccctgctgcaggttatgatgatgtcagacaatgctaaaggcagagcagctcattcatggaagaaaagagggagtatttcttctctaagtaatcatgaattttggcgaaaggaaattcatgggcgcatcaaagattctatgagtactgtgtcttatatggaagaacccagtcagcgtgatgatatctctcgccttacagttcagatggaaaacacctatcagttgggttattaaagcccaggtcaaggacttgatgattccacggtataaactaattgtgattgttcacattggacaactgaacaggcagagcatacttattggaagcagatgcctctgggatcctaaaagtgataccttttcatcttatgttttcagaaattcttctctcttcgctcttgcaaatgtctatgcagtttaccttgagtgattgaaaataagaaatctagctcttacttttgaaaattctgaggcaggctgtatgtctgtacacaaaagttttactgccaaaaactttgagaaagaaacaacactgatatttcaagcaactggaagcttttgaattttttcatattctagtaaagatttggggaggggagggtagccacagaaagaatcttgtttatctaaagcaggaacttgatcttggttttgctggattgctttccatagacatagattcttattaaatatttgttttggtactaattattttaattattctttaattagagtgttacaatttcctgcattgttttttaataaaaagaagctttagaaaaactatggctatataccctgaccaataaatgatagtagaatattcaacatggtatacacaaatgataaataatgtgcctcagtgctgcatataaaagaatactggttttcattttgtacttaataaattgagcagcattcattaagtgcaattattgttacatgtacctgacagttgaaactgctgaggtagaattaatggcttcataacaattatcgtggtcccacgggctgcaagctaaaactagaagctcttgtggcttgcctgcactttacacaattgtgggagaaccgaaagttggctcttcagtaatggaaactataaagtgaataaaggctttttgggacactgaagtagacattgtgatattaaatatacatgatgcttaatactaaatgtgtctgtaacacataaaatcatttattggaaagagacattgcttttaaatatcctaggctaacaaactttttcacaaaatatatggctggcaccttaacaaataaagcatgtgtagttaccattttactcctatgaatttaatactaaagtgacccagtgaggtttt

SEQ ID NO: 883 - protein, 72 aa, Homo sapiens
MMMSDNAKGRAAHSWKKRGSISSLSNHEFWRKEIHGRIKDSMSTVSYMEEPSQRDDISRLTVQMENTYQLGY

SEQ ID NO: 884 - DNA, 46202 bp, Mus musculus
  misc_feature (1)...(46202): n = A,T,C or G
catgactctcatttagatgcttattaaggcaaactatgaacataagtgacttaattacactggagcaccttgccaagctgttatcaggaagcatcagggaggcctctggagaggaacagatcaaaatgacattccacagcctggctgggctctgctctgccttctacttgttcatctatttctaatgaggtcaacaggaaaacatgaaagggattaggtgtgagcgaacaggagagaagaggttcctaggatactagggaggcctgacagtggccagagcatccacttctcatccactttcctctggaagcctgggatgtctgcagcagaagaatgtgctgggattagtgagagcacagctctcttactctgcaggagtttaacggtcaaaaaaaggatggctaatcagaagggaagaatggcggagctctttccttcctataaccaaatgaaattattactgttaaagcgacaacttgcctactaggtaagtgggctgaggtgctgggactctttttaaatggaaaagtttaaactgcctggagacagagctcagctgggtacatgagtaaacataacttacccagactattgtagctgcactgaaaataaagctgctttctaccttctgatctcagttctgaagtgttagtggggatttagggggttactggcaattagagaaaggaaaacacacatcctttgatcaattaccaaagaatttttagtaactctgaaattaagttgaagaacataatactgtgtgatgtgattaaaaaacatcacggaactcaaggctgaggactggcacagacagtactagatgctaatctagggcacaaggctgaggcaggtagagtggcagctcccaatgattcaagcctgacaacctgaggttgacagctcacataaagtggggagagagagctgtctcctctcactccctcccccacctgtctctgtctctgctgcttctcccacaataaaataaaaagaattcaatctcaggtctgatttgcactaaaatatctgtgtgtattctgttgtttctttaccgtttgggtcttcagaggtcatttggaagacaagctgcaaaaaagaatacacactgcaaactacttcccagaaatgttacactcacgtattgttttgttactgcagctgcttacattattaatatgctcatcaaatgtgaattaaagtgttattatcacaatctaaccaatgagactatagaatattagggacaaacagcattttcaaaagcatgggaactctttagactgtaaagataatggagaaagcaggaaagcagaacaccagctgtagagcacgcagtctaatgagggaaagtatgtttttgaacatcaatactgtggtagaactgtaaagttttcattttagttttatatattctcaaatatggagtctttatacataattctgcttttcacccctctaacttggaataaagtaaggagtgaggcatggcaaggttgcccatgcctatcatagcacccaggaggctgagcaggagtttgacagtataaggccaacctgagctagtacaagatcctaccaaggaaggaagaagggaggtggagggataaaatgttaaataaactggctttgtcattcagcaagataagtgttttcctttcattggcagcaatcccatgtaggctacagcacacataattttcaggaaatgcctgctttgtgcaagtccaaggttctgctcggtgtcctctggcctaatccttttaaagcaacatatgcaacctgacctggggtgaattcattaactccacaaaccaattaaataaagactagttacgcttttcttcctgttttatgagttttatattttctgttattgctttctcttttatagtatacatcttgtttggcctctctttttttttgggggggggttctctgtagccctggatgtactggaactcactctgtagagcaggctggcctcacactcagatccacctacctctgcctgagtactaggattaaaggcgtgctgttggcttcattttataggttgtatttattattcatctgaacggtaaactggtgggttggggaatgtggctcagagagaacactatcctagtattattaggtcctggattggatcttcagtatcacacacacaaaaaatgaattaatgcaaaactgccttttaatcataaaaaagttcaggtggtacattataaaattaagtctacaatattgattacaaatgattttcaaattgtgtgtacaaagaaaggttcgtagtatataaaacatgtaggcatccacactgccagtttgacaaactggaaagccacagagatgtaaatgttcaaagtatctctggaatgagaaaaaaaagtggttgggctctgggaaaggaaacaggaggtttgaactgtttgccagggtcatttttacttttttaaaagtagtagatgttctcaaagttttcttaaatgataatgaaataattattttaaataaatacaaaaagtgcatgagcaaaggcaaatgagtaacaaggaaaagtctgctctgtgaggagacacgctggggtgctggggacttctctgagcatttccaaacttcaggatgtttgaaattttaatcatgcattttaaaaatgttaccttttaatctaacagtcaatatctagtgttcttaaaactgaaacaggaccaagaattctgagtactaatcttaacattcccaaggctatatcaagagatatttggcaggtcataaatttcctgtattctcttacgagtgaaaagagctccaagggagcaagacggtatatgcctatacctaaaagttgagggggagaacagaacagtttgtgtcctttttgtttgtttgtttttgtttgagatagcatttctctgtgtagccctggctgtcctggaaattgttctgtagaccaggctggcctcaaactcagagatccacctgcctctgtctcccgagtgctgagattaaaggtgtggactaccatcacctggtgagcctagttgttctctaccagcctgggcaatattgcaagaccatatctcaaagggaaaaagagagaagttggttgccaagtatttttatctattggaaaagcggcggtagccaagctaatccttacagaacattttcaaaataatgctaaatattgtctatgagatgaagagagaaaaagttactgatccccctcctgcttccctagcccccctcaaaatgacctgtactttaaatgtgtaagttcaaaattgaaagtactatctgatggtagagcttatgagcccactaaggcccggggcttgacaggctaaacatccactcaagtactcactagctaacgagagagaatactaccacccacctgtttcgcaagcacagcgagcacagcaccagactcccgtaggcctcagtgaacttctgtaacgccctgagccctgcccctggctctgtgaatttctgtctggcttcagcagcagagaacagcttctcagcgatctgctcaggaaagccgatgagggaatcaatgtgatcaacattgtcggagatgaagcccagcaccagactgaagagggacttagcagagtatcgcagattcccctctcgggtgtacgtgaagataaagtgatcggtcttctctttctgtgcagtgtcgtcttccctgttcatgcacagctccacggaaaagcctttgggaaagagtctgaatggtcgtggcttctgcaggctgtttttaacaccatccagagccaggttgaccatgtgtagctgcccattttctcgaacatagatgggccctggatccaggtgggcttctgagttgaggtagtaagccattgccttggttgcaactgtaaaagcaaggtgtgtggaggcaaatccaattagaatgtcatctgcagcttcaccttgctgtgcccacagctttatgatcctaccactaccaggaaagcaagactcaccagttgctgagaactttgtcactatgaggctgttctactgtttttacctgaagtgcctcttttgcatttttctcacctatttagtaatctactcatctttcagaactttgagctcaaatttcatttggagaattcacccagaatttacaaaaaaatgccagcaacaattcttttcaaagtagactcacagcagcacagcttatgttagcagagcaacgaggagcatcaactaaatgcccaacactgagtcctagtaaacaaagcatacactatttcatcagacattatgaacccactagaattctggaattaaaaatgtttacacacagaaaacagtaactccgctagcgggtttggcactttccacacatctctttgttgcacttggctcactgtcttattgattggcttctgggtctgtcttagctgctttgcacacagagagaaagaccacatttaattcagactccataacaggactctggtacagtgcagtcccttgggagaatgtcatggaactagtttacaagttccataagccttaggtaaaccatgagcaaaaggatgtcttgaatttacaaataaaggcctccacaacaaaggctaaataaaatcattacagtcttccagtgttcagattctgtccaagcactttgaggtaagttaaaaaccaaaaagcagttatgtttttctttaatcccactggtgacattatgcatcaagaattataataaatactattttcttgagtgagatttcaaattacacaagaaacttctatgttaaataaaggcatccgattatcatttctacaataagaaagggggaaatgtggattttaataacatgtcagcctatcagtatttctctctctctttttttttgttgttgttgggttgtttgtttatttgttttgtttttgagacagggtttctctgtgtagccctggctgtcctggaaatcactctgtagaccaggcaggcctcgaacttcatctgcctctgccacccaagtgctgggattaaaggcgtgccccaccacacctggctcctagcagtatttctaaaactctgaaactatccctcaaagactttggttgacttttggaggtatatcaagtcaggttctacatcaatacctacaatgtggcctgaagccacttacaagtgtcagcaaacaattaagttagtgacaaaaatgctgagtctctgaagatcaagcaatgatcctatttgtgggaatcactactgctcatttttctcctgagaataattatgtatataaagcacatcagaaaggagggaccagcctagccctggagcctcaccctttccagctcatctactatgttctattctgtggccctcccaatgctacatgggtaaattgccactcacttgacccactggaattagcttagtttactgcttttggttgttctgcctgacctagctatttcctgttcatcattaacattcagctcaaccatcactcagcattctcctgggaaacttctccaaccccagtaccagtccatgtctgtctggttttcccaaagcacccagtgtttccttttagacaacacttagcactgtgtactatgttcaattgttactgtacccaaagctgtgagtttttttctttctcaggccgaacatggtgcttagtactgagtaagcactcaacagatatatgctgaactgaatgagacctcaaaggggtagatttagtgctgcgttgaagggcctgctgatattgttgctaggagccagctcctcttccaggcaacagctgcaggctcctcccccacttgtcagccccttctgcaggtggtagaagcagagcagatgatggggctatattgctactggtactatgtggggggtgggggagggaggacaaaacaactaaagtaaaaaccagttttttttttttaaagtcttgtcatagtgccagttcttacacttcatattcttgccagcatttaagggctgctgctgaaaagatgccctccccacttgctataaaagcttctttcagcagggcaagcatttagccccttcgacctcacagaccttaatcctaacctggagaaaaagaaaatgctctttgatctttaagactagaacctcaagctgggcagtggtggtgcacgcctttaatctcagcacttgggaggcagaggcaggcggatttctgagttccaggccagcctggtctacagagtgagttcccggacagccagggctacacagaaaaaccctgtctcaaaaaacaaacaaacaaacaaacaaaaaacaaaaccagactagaacgtcagagcctactctacctaggtatcagaaagtaaatactacgtatggcataaaaacaaattatttgctagacaagaaatgatcaagtgggtaaatgaaggaaagaaaacatatcattatcaccattttagagtggccagaaatttagcatgtagtccaggctggcttcaaactcagagagatccttctaccatggctttccacatactgggattacagtcataagccactacacctagcctaacaatctaactgtaacagcagaagggcaaatcctatgaagataatgtatcttaatggaccaacacaccataatactgatgaggaggacagaaagacgaaaacccaggttttacatatttgcactgctcttaattctcctctctaacgtcccacaaactttggagtaaaacggaatgaatggatgacagtgtctcatgaaaactagaagtatgattccatccagcagagggcacaagtagcgtgggaccagagtctggatgctaatcccttactctgcccctcctggcaactttacccttcaaaaacaggggcacagtgaggactaaatcacatcttcagactacttatcaaacagtattctctttttaaatgatgtaaaaattcagtatttactgaagagtatatctacatcatttgtccaggcaataatccaaggctttgctttcttcagttatttgaagaactactcttaatttagggaatcatgcatggtaaccttttttttttttttaaaacatcctgcattcttccaataaagtacttcctgaagtttgtaatgtactataaaatgatctaaggattaaatgaatgtctgaactttcaactttaagaaccataaagggtaaagcttctctcctggatattgcttgcccgtcactattattcatgttggcctctacaaactggccccttaaaagacaagagccttttcttgcctgggggtgtgaaggttggaagtgctcttttaaactggaaagttaagataacatgtatctgcaagataacaatgttcagtgtagatctcttgcagctatgggtcagattaacagagtgactggctgactggcggtgttctagcccactacagagaaacagctctgtgatctacctaagcattacaaagcattaaaaatgtacagcagtgcattcacattacattagtgaagctaaagttagcacaaagcatatcatttcttcaaataaatgaaatataaccttggtacattaaaaattcagttctgtaaaacatctttaaatgagagaaggataaaataattgacaaccaaacataagttttaaaaccttgaatccagcttccaagcaaaaagcataaaattattccagacaaagagaggaaagaggagagaggcatcagggtaatagtgctaaaactgtgagctgagcctatggttcaggaaaaaaaataccaaaaccaaaaatcagaaagaacacctaaccttaataaatcagtcttctaagaataagtaggccaaaataatgatcaacaataatgattccagatgtgactgaaagctaccattttttatatacctacaagctaacaagcactgtaaggtacaacataaaatgatgtcatgcaatcactgatcctatgaggtcagtattgccactttatggatgaagagcctcagagaaatgaaggaacttaaggctcacaactcctaagtgagagagcctgaattcaatcacaggtctgtgtaattccaaagcacaagatcttcccacttgtatctcaagaataaaaatacaacatcagccttaaaaatattcttaaaacactcaaaattaacatcaccggccatttgatctctctggaactcacaatggctcaaactgggagttaagagggcagggactatagtaaaaaacagtggtcatctgaggaagagtgggtggaaacagaaccagggctcactcaaggatgaagcgctcccccttcactctgccagggcagaaatccgccatatccacacaccaggaaaacatctgtcaacccactaccttcatctcaagactgcagacacctttggctcatttgaaaatgtagtggtttttaaagactttttcttaacataggaagaaatccgaagagaaagtagttccaaagtatctctaaccaactaacaatccatcttcattgttctgtgtcaccgccattattcaatttcccactacttcttttttccctgtaacttgccacttccctacctgccttctcccccaaactgcagaaactcatgtcctatccgggcccatactttgtccaagagcaagctaatctctcccacatcttgatagttttacccactctttagcttttcaaacagaaaaaatttcagtcccccaccccccaaattctaaccttccccattcactcccagatcttctacccatcttcctcacatcccagactctcccgtgcccctcaaaagactcaaccccgcctccacctgtcttctagcgacccgtctccagcccccatccttctctccctcctcacgagtcttcctctcaccatcgaggttcctcttagcaccctagtctccccatctctttcccggttttgcgtcctcaaccttcagattcccctttcttcacgcctcactatctccaacttcccaatccacggcctcaactagtttcttccctgcccccccccgccccacccctccccctattccaaccctagctccttcccttggtgcactcctcaaccccttttctttccccctttcccggcactcccacccaagcttctccccaagtccacctaagctaaatccgctccctctcccgcccagaaccctaaattctcacacaccctcagtctaacccgggacgccgcggaccccacccttaagcccacctcaggcacccctacctcttcatcctcccacccctcccaccgcgagctctacctcgtccctagggcctttcccctcccccagcccctcacactccgcccccgcacccacgcgctgcctgaggctcggcgagcggcccggcccgcggccgccacctacctgtgcccctgcccggggcagcgagcggctgcacctcactggcggctccttcctccactgagcggctgaccgggaagcggctcggcaacctaggccacaaagcccgtgagggtgggacacacacagagggtggcaagagggaggggctgggggcgacctggcgccgcgggactgaggtaccagcagggaggggtggggggggaaaagaactcggctgggtaggcgcgcgtgcgcggggccggcatgaggggcgtggtctgatctggagtgggcggggcatgtggcggggcggggccgggagtgggttgggacagccgagctgagaaagccgggcggtcgcaggaagggtgaaaggggcggggcggggccgtgcgtgtgcgtgcccgcgcgagggcatgtcccccgagatctcttggaggcccccccacctccccgaggcaatgcaatgtaaaggtagtcctgaggaaagacgcgcaagtgaggtggcgcttctaggcggagcccctgccaggagagggcggggcggggctgcgcagggcgcgcgcctgggaactcctctgaggctgaggcggggcgggagcgaagcgaagcgaggcggggcggggccagggccgggcggggcgtgacgggcggggatcgcgagcggacccggtcctttcgcggagctacccaaggcccaggcgagcgggtccgtgcagcacggtgggcgggcaccgaagaggtgggagcccggtggcgaggccggcggagggttgcgggcgggaaggaaccggttgtgaggagacgcgcggcgggtgaccgcgggtggagcagcgatgtcgctgggagagaacagagtgattagggcctggcctctctctaggcccccctccccaagaacttttagtgccctgaaatgatgctttgaccctcagaaggaagaacaattacaaatgacagttaatatgccaaacgtaacacattatcagcacggtccaacctcaaacaggaataatatttaaagtcaatgtgggtgcatttacgttatttgaaattatttgagtcttggaggtgagaggactgtgtccgggctgccattatgggagaaagagaatgaccggttttaaatttacaccagagctaccagtggatgctgtaggaaaggatttggggcaggcagatgtaagagcacacagacccaaaggtgctggtcaaggagaaaatcaacccaggacgtgacccagaggttttctgaaagaagtaccagaaagggctacactgtatatttaaagagaaaatcaatggccctgggaaagggtagggaatccaccgtccctgtctgtaaaacccagaaggatggatggtgtcctagagcctactaccactttggtagagagtccctgagggtattcatcctcgcttagatcaagcattgcctctcaaacctccatcttggagctgtgtggaaacatgtctgctgggtggttttatgggtttcttgggattggtttgcctctttctcattaactgcaacaaaaccttaatgaaagccaaatctctgcccctggttttaaagaacagatattggtagttcaggtatattcattttttattaaagtgctttatattcactgtattaaagtgcttgtttgctttttccttagatcatttaagaataaggtaaaaaaaaacctgaaaatttgaagagaacacactgtatcttattcatctactatatacatagatatgagaacatttccctagatggtaactcttttatttattttggttttttgagagcaggtctattctagcccaggaaaaccttaaactcacttctaatcctccagccttgacctacacagtatatggggcatcacccctgacttgtaatttttttgaaaatgtattatgctcccttatacattatttatccacatgagatatatatcctgtatttacctgttttgagacattcacaccaattttgatagtaaaagtagaaaatataaaaacaccacaattttgtcaaccttttgcaggggatgtacatctttaatgtatgcataactggagggggcactggaagttttaaaaaatgtttattacatttattcatttggaggagcatgcttatgagttggttttttttttttttaatctgccccgaacagtatggaccttaatcatgtctttgagaggttctgaactgagcaccgtactctaggtgtgaatcacattgttagcacccagccactagttgtgtgtgtgtgtgtgtgtgtgtgtgtgtgtgtgtgatcagcttgctgtatcagcattataagtgcctgggcccttagtacccgtggaccccttactgatggaatgtgctacctctttaacttcttaagttgcgtttttattggctgttgggtatcaggcctggggcccatgcctgcccagtgtcactttcccattgtctacaccttcagcctaacttttagtaaatctaaaataatactttttttttttttaaataacacttttaaattttacctttgggccagtcttgtcttagtcttgtcttatgttgatttttgtcatggactaaacaagttaaattttaatacatctagatcaagggtcataaaaggccaaacaatattttaggctttatagtctgtgacagctactcagttctgccatacaaaggcagccatagacaatatgtaaattgatggatataaccttgtgccaatgaaactgttctatcttgttcactttctctccctttctttttgcctctctccctctccttcattgaacccagggtcatgaacatgctaagcacaggctatacaactgtattatacgcccctgcccctccagcatttcttttgagggccagttctattacttagcatataagctgacatctcagctttgtcatgtctacagaattgataagcacacttcttatgcccatatttaacaatgatgttatttcaaatacctttatttaattctgctccccgcttcctttgacaataggatcttattctgtagctgaggatggcctggagtttactatgtagcccaggctccctgcccacttgtgataatcttgcttttagtctcctacatgctttgattatagatctgtaccactatgccaagccacataagttttggatgggattatagctcaacagtagatcatgtgcctagcattctgaaagccctgggtttagttcttagcgctataaaaataaattcaaattttaagaagtgccgaatagtacatgttcattttgttttgctaataatcattctctgagtgtagctattcaaagagctataagtaattgttgaagtattgtctgttattcagcctatattttcctggcccaaagtgtatcttgaaaatatttgttaaaattttcagaaacaaacatgttcctaattggtagaaactccaaggaggaaaaaaagaaagttactttggtataatttgatagttaatgttattattaccttcaattttagcttgtgtccacattttcaatttgtaataaactaagagttttgtttgtaattagcatctaggtccatcagcatgtatgtgtatatgtgtgaaccctcccaaatggtgcaactctctgagagtcatgggggctatttttgttcaaaccaccataacatagctgaggtgctccagcctaaccttatggggnnnnnnnnnnnnnnnnnnnnnnnnnnnnnnnnnnnnnnnnnnnnnnnnnnnnnnnnnnnnnnnnnnnnnnnnnnnnnnnnnnnnnnnnnnnnnnnnnnnnnnnnnnnnnnnnnnnnnnnnnnnnnnnnnnnnnnnnnnnnnnnnnnnnnnnnnnnnnnnnnnnnnnnnnnnnnnnnnnnnnnnnnnnnnnnnnnnnnnnnnnnnnnnnnnnnnnnnnnnnnnnnnnnnnnnnnnnnnnnnnnnnnnnnnnnnnnnnnnnnnnnnnnnnnnnnnnnnnnnnnnnnnnnnnnnnnnnnnnnnnnnnnnnnnnnnnnnnnnnnnnnnnnnnnnnnnnnnnnnnnnnnnnnnnnnnnnnnnnnnnnnnnnnnnnnnnnnnnnnnnnnnnnnnnnnnnnnnnnnnnnnnnnnnnnnnnnnnnnnnnnnnnnnnnnnnnnnnnnnnnnnnnnnnnnnnnnnnnnnnnnnnnnnnnnnnnnnnnnnnnnnnnnnnnnnnnnnnnnnnnnnnnnnnnnnnnnnnnnnnnnnnnnnnnnnnnnnnnnnnnnnnnnnnnnnnnnnttagttaagaaaaatatacacagaaatgttagaacatgtctctcacagtataactacagctttcagtactcttgatactgctttgaagtataatggagagtgaacttttttgttaatataaaaaaaccaaaaagaaatggaataaaaattgtcataattaacctaaggcctacaagatgctcagcggggaaagtgtctggtatacaaacctgggccatttgagtttggtccccagaacccaaggtggaagacgagaactgactgactcttcagagttgtcctcaaagtttcccagtcaccacaaaatttacacctacagaagcatcataatacacactcagaaataatagtaaatacaattattaaaaagtatttaaattataaaaatgattcaagaactacaaattttggaatttaaaaaaatggctctagagctgggctgggtggcacacaggtacacacctgtgatgctagcgctggggaggctgaggcagaagaatcactggtttgaggccagcattataaacatggtgacaacttgtcttaaaaaacaaataaacaaaaaactaggccctataaacacttaaccaggtatggatcaaaaaacctctctctctctctctttctctctctctctctttctgtgtgtgtgtgtgtgtgtgtgtgtgtgtgtgtacacttgcacaagttcaaagccagcttaggctaaataaaaagaccctatttaggaagaaagaaagaaagaaagaaagaaagaagaaaaacaaagtgtattgtattctatcatttgctttcagtctgtgtctttataaaaagagagtgagtctcaaaaatattatttggttgactttcaagtccagtctaataagctagtacttagtttattaatggtaagtggaaggatactgtatttatgtttaaatctgtgttcctgctcttttagtatagtcaaatgtttttctggtattgcatttttttttctcccctgttggcttttctcctagtctgtttgtgtttctgtaataaaatacttgaagctgggtgacttgtaaagaaagtaggtttgtttaacacactattctggagagccaagagcttgctaacatctgcttggtgtgggtaagggtctcataggtgataggtagcatgtaggggaaaagagatgtcacaaggccagaggtggagctgggcggtggtggcacacacctttaatcccagcacttgggaggcagaggcaggtggatttctgagttcgaggtcagcctggtctacaaagcgagttccaggacagccagggctacacagagaaaccctgtctcggaaaaaaacaaacaaacaaacaaaaaaaaaaacccaaggccagaggtggaaggaagcaggagagcgggaaatgaatccactcctataaaggcagcctactctctgagacccatgttagcagtcactttaagaggactgcattgtgacctattcacctcccaataggtttcatctcttaaatggcccaccaccttccactatagatatagtagagtccaaactcccaccatttgaaccaaagaagccttctgtctttatttgttggttttatctttattggttactgtacaatcctaagattgtgacatgaatccttaacatcctggtgtttctctttgcctgtctttgtctggttttgcagtcctgggatctaaccccagccattgtgcatattgggcacccctcctccatgagtaaagtgcacccctggaggatcagtgtttgcagagatacgttactgtggttctttctctgactgctttgcctttttttttttttttcagcaacagactaatcgtgcctaagtagaatcttcaatgtgtttgttcaatttaaatttcagtgttatttgcagttgtaaatttatattttagattttgggaaaatgttaatcatctttctttatatttttctcctgcactattcagtttctctctcctagatgtcaattctgattgtgcacatttcagactgattgatattattttataggtcttatgttctgtccacttatttattttttaagataatttatttttattttctgtgaatatgcatttttgcctgcatgtctgtgtaccatatacatgtatgttttctggggattgaactcacattaggcatggctggaagcgcccttcctgcctgagccatcttgctactccactgatctttgattagtgctaaattctatctgatgtttagcctagctaactttttttttttttaactttacataactgtagttttcaattcaattctgaatttctgtgttgttcttttgggttttcatttctcttgtaaaactcactttctgttcacccattttgtctgtgtccttactaaattatttctatataggaatctttgtatcttctgatataagctagcgcatgggtaccaccagcacccaagtcatctgctgaggtgcttctaaccttgcttgattcagtgtcttcaacagaaggtggagtaaacaggtcattttttaccctagagagttcagatctttcacatttttttccctttgtttaggggatggcataagggacaaatcggttctgcttctttagaccatgttgcaattgtaaatacgtttaatttacttcttacttcaaataattaagcagtaagcttagtttctcctccgttttgtgtgtcccttctgtacacaagaccaaagaaaccttcctttgctttgcagctagcagcagcttcctgtggggcttcacaggagcctgtttctgtgatctcatctcaggtgacatgcatgggggctgtgctgcagctgcacctaactgtacttaacgtacatacgacatgataaatctcataaacacagtgagggaaagaggccagatacagataagcctgaactgtgattccatgtacttgaaacttaggcagactccacccacagtgttagaaagagaaccactgctccttgtggggaggaagaaaggtagtaattgggaaaggatgaggaagacttttcacaagctctaatgtttctttaccttaatgggtttgatttgtaaagttttattgaatacattgcttgtggtctggtcccttttttatgtgtgtgttatagttcagtaggcaactcttgcatcaaaaccaaataaagctcaaaccaagtatggtgggacatatctataatcctagcagtcagaaggttgaggcaggagaattagagttgagataatagcaagaacctgtttcaaaacaaagttaaaaaagaaaaaaatcaagcatagattgggagaagacatttataaagacacataaaatagaatttgtatgtagactattgctaagattttttcgtatgtgtgtgtgtagaatttgtatgtagactattgctaagattttttcgtgtgtgtgtgtgtgtgtgtgtgtgtgtgtgtgtgtagttgtgnnnnnnnnnnnnnnnnnnnnnnnnnnnnnnnnnnnnnnnnnnnnnnnnnnnnnnnnnnnnnnnnnnnnnnnnnnnnnnnnnnnnnnnnnnnnnnnnnnnnnnnnnnnnnnnnnnnnnnnnnnnnnnnnnnnnnnnnnnnnnnnnnnnnnnnnnnnnnnnnnnnacacatgtacacatccccccaatctggttactatgcatctatctgcatcagaacaggtatgtaaagcagaggataagatctgagaaacttttctgttttaccttctaatagcctctatactggagctcaataagttccttcagcagagatgaccaggtgactagttcagaatttcttttaaagaattatttattttggctgggcagtggtggcgcacgcctttaatcccagcacttgggaggcagaggcaggcagatttctgagttcaagaccagcttggtctagcagggtgagttccaggacagctggagctatacagaggaaccctgtctcaaaaacaaacaaagaaagaagaattatttattttatgtatataagtatactgtagctgtgtcagacacaccagaagagggcattggattcctactacaaatggttgtgagccaccatgtggttgctggggattgaactcaggaccacttaaccactgagtcatctcttcaacccatagttcagatttttttttttgtttttgttttttgttttttaaagacagggtttctctgtgtagccttggctgtcctggaacttgctctgtagaccaggctggccttgaactcagaaatcccagaatttttaagtaaggttatcactttccttatctcatgtttctattcagaaaatgatgactgctgctgttacagatccctgtaattttagctgttggagagactaacggagggggatcacattagcctgggagttctgaggacagcatggctaacaaagcaaaactcatctcagaaaagcaactaaaagcagagtgtcagatgtaaatgagcctggggtggtgggcagacctgagaccccaactcacagggagtagaccagaaagatcctgaataggagagaccttgtatttgctaccacccctaaaatgcagccaggtgtgcatgcttatgcttgtagaggccagaagataactgtaagctctaggccagcctaggctagtagtggtttttagaccatcttgggctacagagtgacccagactgggaaacaaaaaccctaaaagtaaacattgttgatacttggattgataagcgtatagatactcacaaaatacctgtttttagcctccaaacttaaaaaaaaatacagctataaacagtaagtcacccataatttatgtcaccatacctgttatctaattactgagggttttaattttagaagtggaataatgatgtcagttcaagtaatcaaagacatttcgtggaacatagcaatggaaatgatcatattttataggtcatcccagagagagagcagaagtttgcggaaacaaaagtgcaagtccctcccacattttgaatagcttggtggttaaactgtgtgctaggcaacagccttgctttgccttctgttgagaatcaagagtttgcctttttattactgtatgtttataaaaattgcaggctaaccattttgaaatgaggaaagtggatctctgctcagtcactgaagggacagaagtgattctggccacatcgagtgatgaaaagcacccacctgaaaacatcattgatgggtaagcgggcctcttccttctgtcctgattccagggttatgttaggtcagggagcccctatttcatagtaactgatactgtgaagcagtttaataagtatttagtgagctagatggcttcataatatctatttgtggagtcattattgaactaatttttttgtaaatacattttttatctttgtgcaaataggttcgatttttaaaaattttattctttttcactgctggaaattagaccagggccctcccatggtagacaagtattctacaatcatgctgtttccccagcttttgctttttttttttttaattgtaatttgggttttctaagtcggggtcttaactgtgtaacctagatttgtcttagattcaaatcctcctgtctcagagtctagaagtgtagtgatattataccatttcaactttgcaaagagacgtacatgtgtgttctaagatttattccttttcattttacatatactagtgttttgctcatatgtatgtatatgtaccatatgtgtgcaatgccaaggacagagaggacaccagatcccctagaactggagttacagatggttgtgaactgccatgtggtgccaggaactcaagccaggtcttctacaagagctgacagtgctcttaactgttgagccatctcttcaggccataaataggttttaaaaggtgttttaacaagacaaaaaacaagacagcaacttcattttatggaagagtaagatttaatatctggttttggtttaattctagatttttttagaaatacaagtatatagccgtggtcacttcctgtgtactgtttgcttgcttgctggtctaagcggtatctctgctgagctgaatgcctcacttcttgcccctcctgcatccatcgtgtgcttcattccagtcctgcttggcgaggacgtagagggaagtcgtattctcagacctttcattccaagaagagtggccaatggagaacacaccacttttgtttatttctaatttttattttatatgtgggttttgcctacatgtatggctgtgcggatatgttcagtacctagaaaggccagaagaggatgtcagatccccttggctggagtttagacctctgtgagccactgtctggcttctggatcttctgggagagtagccagtactctctctagactaagaacacctcttttaaatagttctggcttattattcttaaatcctttcaatttgtgtacatacccacactggactggtggaatcagatcattttagagctgaaaggatttattagagtatctttagtttagacttggaggaagacaggtggactcattaaacactgtttaattattgaggcagagccagttgtaagatggagatgttataagcctccatattctattgtgcttagatgagatcttgacaatgaaggtcagttgctgctcctctctcacaccttcccctcaggtgtgggggctttgctagactccaggaacattagattttagtctctattatgaaattggatgatttgatttttgtttcttttttttttgtaattgtttatctgtaataatatgtcctctctcaggaattcttagaaatgtgaattagaaatcagcctgggctttgcttatctttgactttatagaatcttgaactgtttgttgactaggtttttgatttagaatacaaatatttgttaaacttggctaatgttaaaaagcatgcgggcaggggtccatcccataatcagccaccaagcgcagacactattgcatacgccagcaagattttgctgaagggaccctgatatagctgtctcttgtgaggctaagccagtgcctggcaaacacagaagtggatgatcacagtcagctattggatggaacacagggcccccaatggaggagctagagaaagtacccaaggagctgaagggggtctgcaaccctataggtggaacaacaatatgaactaaccagtacccccagagctcgtgtctctagctgcatatgtagcagaagatggcttagtcggccatcactgggaagagaggccccttggtcttacaaactttatatgccctaatacaggggaaacaccagggccaagaagtgggattgggtggatagcggagcgggggtggggagggtataggggacttttgggatagcatttgaaatgtaaataaaaaattggaggaaaaaaatggaaaaattaaaaaaaaaacatgagggtgcatacacacacacacacatgtgactgcaaatttgtttaggacttttacaatttaggaagtagtaagcatacataaaaacggttgtcaactatgcatggtgtttcatacctataatcttatgttattgggaggctgaggaaggaggagaattgccttgaattcaaggctagtctacactgcagaatgagaccctgtctcaaaaaaagcaaggggaggcagtaaagagaggtctcagaagtttagagtacttgctgctcttggagaggactagagtgttgttcttagcatctgcctcagactggactcagttggtccttcaacccgtgggagaatgtcggtggggtgacaaacagacacaaacaccagagagagtgttggatctgtgtgtaatttctcaaagtgagcatcagacttatattacagaagaaaacaaggaagtttagtgatacattgaggtcatcaaaggtacatgaggttacctgatgcaaaaatgactctttatacaaaacagaggaatgcatacataaaagggaacaggaaccatgcagtgtttacaactgggataaaaaaatcagtgtttacaactgggatgaaaaagagccccacctaaggtcagtttattcttagaagccaggggcaaggacatagttattccaccttttacctaggccattgtaaatttctatatatgggagtgactcagctgtttttctaagtatttactctagttccttcttagaccacaaccttccttcttcctaggccattgtaaattcctgcgcataggagttattctaagtttactttgtagaactagccctgagatttctaggtcttttttagtaaattgtaatgccggatttctttcactatctacactggaggcatttcgtctgaatgaataaatttaaaactcgaggtcagctcaatgatttcctaggatattggaacagtggtggaggtcaatctaacttagcgatatgtcaaatcattccttggaggcacttataataaaataatactgaaagcacacatatctgttcaccgactaacacaaggacaagtttggagcattcatgctaccggataccaaggatccaggagactaaatttccatgaaactctttgcctcagaactgtgtccaagcttttgggtctgtcactggcgtgggtgtagcaagcatccacattagatggctcacaacctgtaactccagctccaagggatctaagaccctcgtctgacctctgggcacctgcatacatgcagcataaacacacacacacttgagcacatggactcatacacatacgcataaatacagtaactaaacttgttttaaaagtatttttggctgggcaatggtggtgtacgcccttaatcccatttcttaggaggcagaggcaggtggagctctataagttcatagccagccttgtctatagagtcaggtccaggacagcctgttttcaacattaataaaaagggtaccaaaggtaaaatggtttgttaaaaataatacaaataaacgaatgatagaatcaactaacatgcatgttttctaactctcactaaagggttctatataacacaaatgtaaggcttgaataaaaaacttaatacctgcctttgcctgtgtcataattcctgtgaaaggcaagtaatagttatttatcccatgacttggtatagaaaaattagtgtacatatacacagaactgcagaactttgtctttaagttgttcatttagaatagagaactttccagaatgcccttcactccagttggagatcattttcctaaggcaagatcaggacctcctccctttctaacgcctttaattaaaaagagttacttgtgtgtgagtattttctgcaggtatgaatgtgtatcttgtgcatgcctgatgcccatggaggccagaagaccgcatcagatcccctgaaattagagttacaggaaattgtgagctgcagtgcgggtactgggaactgaacctaggtcctctgaatgagaagtcagctctcttaactgctgagccgtccattcagccacaggaatttttgatctctgtagtcctagcgaacacaaacaggctttatataggcattaaaattattttatgctcagaggttgttttatataattggaaatagctacagagttacttggagaaaatggtgctgtaaatgtattcccacagtaaggattatcgtatgcccctgctgcatactttaaatttccttagaggttagttgtactgtttttttgttattgtttgtttgtctgtattgttattttgaaatagtctcatgtggtcaggctggcgtggaaccactatatagccaaagatgacctggagctcctggtctttctgcctcttccccaagtctggagattacacttggctagaaagaaggagtcaaaagaatgtgtttatttctcctgaccccacctttgtcctctgtacctagtatgccagtgaaaagggaggacagaaactccacagagaaaacaacaaagctaggtgtgagatatctcatacctggaaccccagcatttggaagactgagacagcaggggttcatcaaagctggaggccagcctaggcaattttgtaagatattgtttcaaattaaaaaaaaaaaaagataggactataattgcacacatgtgatctgagctcagttcccagtacatattcacccaccccgtgctttgaaaaagatgtggtcctttttgcaagtacattgaatactatagttgagtcatataaatagaatcatatatatatatattgtggtttgagctcttttaaaaacaggatgtcagtagctgaagcaatttactgtgtagcccaggccagcctcaaacccacagcaatcctcctgccttagccttctaaatgctagagttatagatgtgtatcaccatgcctgtctcacatgagatctattgcttattggttttgattttttttttaatttatgagtatggctgctttgcccatataccccatatattcctggtacccacagagtctagaatatggtatcagatcccctggcactggcgttatagatgcttgttgtgagccatcatgtaggtactgggaatcaaactccagtcctttgcaagaatagccagtactctttacctccgagccatctctccagcccctttgtgtgtgtgtgtgtgtgtgtgtgtgtgtgtgtgtgtgtgtgtgtgtgtgtgtgtgtttatgacaaagtctaagtgtggggctgactggcctgcaactcttggtggaaatctgactggccttggacttgccaggatccttccatcttggcatgaaccatcacaccacacagagcctgtacgctgctgtgaggttccttccacttacatgatttaaggttcctccgttttgtagtaaatattactactatttttttagatttatttatttatatgagcacactatagccatcttcagatattccagaagtaggcattggatctcattacagatagttgtgagccaccatgtggttgctgggaattgaactcaggacctctggaagatcagtcagtgctcttaacctcggagccatctctccagtcccatattactactatttttcttattgtcaaatattcaaatacattgatagaacacatagtacttgtgcatttttaacttgaaagacatttctacttttccaattttacttaaaaacaccagcttagggctcgtgagatgactttgcaggcatggaaacctgcctgaccatctgagtttgaatgccagaatccacagtagaaggagagaactgagtcctgaaaagttgccctctgacttccacttaagggccacagtttacaataataccttgctctcacacacacatactaatactaatagcaataacagcaataataatacagacaataaggaaattcaatataaagagaaagtatgcattagcttacagatctaaaacctcaggaatcctcaagctgggtaaatataaagactatgtcccagcaaacactgaaaaagaaagaaatgtgtaaacagctagagagaaaggctagcgatttgctgaggcacagcagtgctgatgatatcaggcctgctgagtagagagagctcctaggcagtgtagtgtctgacagatgctgaacagaacatgcaaatagacacaaaactgtcaacccagaattctttctcttgctaaaacatacttccaaagtaaagatattttatttgttacaggtaaacttgcatggcaaaaaatattaaatgaactttgcaattagaagaagtatagtaccagaggaaaactcaaacctatatgaaatgtactagtaatagtaaatatttggataactgtaaatgactatatttttctgagtttctttagagatagctaatcactttatgatttaaaaacattatattgtgagattaactatatgtaaaatatgtgacaatagcataaacttgaggttctgggtggtttgactatcacaaagctctctcttttccccctttcctactttttcatgtgtttgtgtgtactgtgtatgtggtagtttgaataagagtggccctcataagcacatatattgaacacttggtccccagttggaggaactgtttgggaagaattaggaggtatggccttgttggaggaggtgtgtnnnnnnnnnnnnnnnnnnnnnnnnnnnnnnnnnnnnnncacaccattgctagatagctctttgccgctaaggatgtaagctctcatcttcttccatgccatgcgtgactgcctgctgccatgctccctgacatgatggtcatagctaaatctctagaactgtgagtccccaagttttatttttttatatattgcgttggtcatggtatttatcacagcaattaaaaagtaacaaagatagtgtacatgaatgtgtgtgtgtgtgtttctctgtgtatgggtgtctgcggaggcctgaggttgatatctggaatcttcccctattaattgttcttccacttaattcattgaggtgaggtttctcagtaaaatgcagcgctcaccaatgattcagctggtcttgctagccagcttggtttgggcatcttttggttttgacttctgaggctggaattatgggaaagctgctgtgtctacctggcattgatagttcgagagagccagactgtctcccttgctgtcgtggtaagaactttagctgctgacccatctccccagtcccacaaggtactaatacagtaactttgggaataaccactataacacttttaaaaacaaacaaacaaaaagagccaccctgatgtcatggtgtttacctgtaacccttacctgagagcctgagataggaggaccaaaatttgaggctagcttaaactatgtaacaagacccttctaagaagtgggaggtggtggagcatggcagctctgcaaacttttaatcccagtgcttgggaggcagaggcaggttgatctctgtgaatttgaggccagcctggtctacagagtgagttccaggccatcagagatacacagtgaaaactgtcttcaaaaaaacaaaaaaacccaactctttctttttgtgtgttgctatgtcacccagactgagaaagatccagaaacttcatggccatgactgtatgtgtcagtcagcattagaagcagccaggaggccagggtagtactgataacatgcatcaccacaggatcaactttgacaaataccatccaggtgacttgggagttagtatgaggcgttaccacttaaagaaggaccagatctgtgaccaaccctcagcctgaataagctttggacattggtcactgagaattggtcagtaagtcggtaaccgctgcctaaagaagactggagctattccagtcactgatgtaatatgatcctgataccgcaaagttctggggaagagaaagttccctaagccgcctgtcatcatggaagccacatgcttcagaaaaggagctcaggagattaagagtgttgggggtttctgtgtcctgaaggcttgaagccacatacattaattaaatgctaactatctttaaaacaaaaaaacctaaggggtcagagatacggctcagtacataaaggtacatgctaccaagtatagtggcttgagctcagtccttgagacacacacagtgaaggaatagtggctcctgatagttgttcctttcccttcctcttcccatgtgtgccatggaagtatacgcacacacgcgcgcgcgcgcacacacacacacaagaaactaatcaaaaatataacatgtcaataggtggaaaatgagtgagtgagaaatgatcttccttacaaactatatatttgaaagagacttaattacattcataataagtaggagataagacagaagattactagaaataaagggatattttatactattagagggtcggttacttaggaagttacatttctacatgtatgagacctaataatcaatttttaaaatttgtaagagcaaaactgaaagatgaaagaaatctacagttgggtattttaagactgtcctcgcaataaaggtagagcaacatgagctggtaaagattcagatgagctgtagagtgttatccaatatcttgatgaattgacctgaaatactggcatcagaggtggcgtattaatcaagtgcacattgaatttccctgaatttccctgaataggtcccatcagactcagagaactgaaatctgaagagagtgttcttagctgggaatggtcgctcccacctgagatctcaggacttagaaagcctccgagccccacggggaggccttgtctcaaaaagggaaaaaataaaagcaccatgaagtttcaacttgggaatttagaaaaaaggaacaaactaaatgcaaagaaagtgggaaatataacagggctggggatcaggtggtgagctgcttgctgagcatacacgaagccctgtgtgtgaggtccagcgccagtctgaaatcctagttctcagaggtgaggcaggagagtcccaagctcagggccagcatagctacacatggagactgtttcagcaagcaagcagaggtacagaatgtgtaaatatccagtactaaaaagaaagaaactatattaatagtctaaaagagtagccattacattataaataacaacactaaactaatacatttagcaatttaagaggaaagggacacatccccaaatcacctaagctgtagaaatggcacaaggttgtgttggagaaatgatggctcagcagtcaagtgcactggctgcgcttccagaggaccctggttcaattcccagcaaccacatggtggctcacaaccatctgtaccaagatctgacctcttctgtggtgtctgaagacagctacagtgtgcatattataatagtaaataaatctttttttaaaaagtaaatttcccttagtgaggctggaaatgtagctcagttgataaaacacttgcctacatgtatgaagcccaggtttacatccagttcccagaatggtaaatgattgagtacggtgcatacatgtgatcccagcacctgggagtgggagcgatgtggaagcaggaggatgaaaggctcaaggtcctcctcagaaacacagcaagttctcagcctgcctgagcaacctagtgagatcctgctgtgtgtgtgtgtgtgtgtgtgtgtgtgtgtgtgtgtgtgagagagagagagagagagagagagagagagagagagagagagagagagagaaagcccagggtgtagctcagcagtacaacccttgcctagcacatactacaccctaagccactccccaggactgaaaaaaacctgcaaaggaatgcatggcccatggtgatggaaatcaaacagttgttggctcagagatagagaaattgtctggaagaaagataagagaatttctggactcatggaaatgttctgtatcctcattggggtattggtcaccctagtgaatcgtgagatatttgaaacttcatttttttttcagcaaacattgtttatatactactatgagtcccctgctataatagttattagggacataaaaatagagaaacgcaagtatctgagcctgtaggggacatcaaagcagagtgggcacaaatgctctgaagcaagtagagtgcatctgctgagttagagaagggaccataaaccttcacaaaaggcagaaggactttggggtcaagagagctcattgtctgatataggtatagacgtgtgtgtctgatgtaagtgtagacgtgtgtctgatgatgtgtttgagagcctcaagcagctggctgtggaagcagtgatgggggatgttgtaaggtgggacgaaagaggctgggctgatcgtcactaggggactgctgaagccttttagatgggagggcatcagctctctttcaggattttacaagagaatatttgtcagttaagaaaaagtactagccgggcgtggtggcacacgcctttaatcccagcacttgggaggcagaggcaggaggatttctgagttcgaggccagcctggtctacagagtgaattccaggacagtcagggctatatagagaaaccctgtctcaaaaaaacaaaagaaaaaaaaaagtactaaagttgaaattataggcaaaactaaattagaaaggggttgtaaaataaaacagcttgtttttaatatttattcattataacattgtgattatggtttttatatctgtctattccctttcttcctctaaaattaacactaggaatccggaaaccttttggaccaccacaggcatgtttccccaggagttcattatttgttttcacaaacacgtaaagattgaaaagcttgtgatacaaagttacttgggtaagcaaatcacacattaattttttattctcctttaatttttccgtaggcagaggacacatgtacacttttggcaggagactagtttttccttacagcatgggatccagttttattacagaaatgggagggtggcgagtctgcgctaactgccttcagcacaattagtcctcttaagttgcaaacccttccaaagcacatcataatttccatgcagcttgctgtgtgaacgtctttggcagaagactatgagtaatgcaagaagctggcttgcccaaatactgagttctatgacatcctcatcctaggttcatttagcctgtagttctcagagtcttgctgtaaatctgataaccccagttattctcattagatagttttgatccttccattgctagtgacatttcctggagattacaagtggaatctcctcttggaacataaagccctgtctgtgataaagtatatcagagtcatggcaggaaacagaatagatcccagatgtttcaagtgaagagactttattaacaaatctacttataaaatcctggcctgggctgcaagaatgaataagcgataattgggtctcagaagccagctacagcagggagccatggctgtcctaagacaaggaaaggaaagtgttaccagagccctgggggtggggactgggggcttggggagggggtagatgtacagtgaggcctggcctgcagggctacatacagtcttgaagggaaaggaccatcaaagacatggcacgaagcaggacagagtgtagataaaagattctggtctcacttctctgtcctgggatcttctggtgcctgccttcccctggccatccccaaaaaaaagtgagttggtaaattagtctaggagatataatttgtaggagtcggctcctccagactaggacagaaaagagaaggatagttctggaggtcatgtggggacaagggaaaaaacgctgtgcagcaggaagatgcatgcgtggtatgcttctgtcattcattaccaaggccctagacagcgcccgtgtgtaaactcttgttctggcatttactggctctagtttactggacaccattcctgtcagaaaagcctgtgtcctcatcaggaaagtagcttaataatacctttctcataaaggcttcagccaggaatatgaacaaatatgcctgactcatagcatgttctccataaagaccatggttactagtagtatcacagccagtatgtaaatactccagatcatagccagattcagaaaagcactactagatgtgtgctgtgtagtgataaatactaacaaggctaccattatacagtgttatgctttactgtaggatttgtgggaaaacagtcatagctttcaggattcctggtgccagtacttggtgttgtcagtccgggcagcagagaaaagaagttcagacacaacaacatagaattaaatcgctaattaacatttgtgtttactctgtttatttacaatgctagtgcggactttgaggattgaaaagaccacatctaaagagccattggattttgagcagtgggttgaaaaaggtgtgtattcatttctccagtactgttctgagcacgagggagtggataaatgcctggtctctgcctttgtgctagcagttcaactgcattttggtaaataaaaggtgactctaatgagtctttagcacacataacgcctagaaaaacacacatttgtgcagttaccgtcacaagctgcttatgtaacattttcaaaattttaggatcattcttatcaaaaatagagatgatacatttaaggcttttgtgagctagtggcttatatatgacaagcaaacaaatattagctttatacctttccttccagattaatgatagtgtttaagaattaactagctgggcatggtggcgcacgcctttgatcccagcacttgggaggcagagacaggctgatttctgagttcgaggccagcctggtctacaaagtgagtttcagcacagccaagactatacagagaaaccctgtctcgaaaaaaaaaaaaaaaaaaaaaaaagaactgagctgggtatggtggcacatgtccttagtcccagaattcagaagacagaagcagggggaatctcttgagtttgaggccagcttgatctacatagattattctaggcttgctgtcactacatagtgagtctctgtttttttttttttgtttgtttgtttgttatttaatcaatctttttataaataacccactgtcctccagttaagcacacacataattagttcatgtgtctatctccttttcttagcaagtcctgtgaaaacaggagaaaaataaaaaggcataaaactataaggagaaaaaaatatataaacctagtgaatcagacaaatgtagatgaataagttttatgccagagggacgtcctgagcttccagaacacagcagattaggttgaaacctagtgccttccaaggagaatagcaagaagtaagctaacttatttcatgcaactccagaaaggcctagaatctgagagcagcaggcgacgtggagtatgaataaggtgtggatgactgctttataataccttatttaagcacactgttcatgaagttagatcagaaagtgggtactgatttcagaaacttagatttctacttaccgtgacacaaactaaaatgacaaaatgtaactaatagaatacagccatattataattccaagaaaagcaacctaaatttaaattttaatgtgtatgaatgttttgtctgtatgtctatgaatctatgcaccacattcatgcccagggcctacagaggtaagcatcagatcccctggaactgaagttacagataattgtgaagtgctatatgggttctaggaactgaacccaggttctctagcaaagcagtcagtgctcttcactactgagccatctctgcagtccctcactcccaacctccactactgcttttttttttttttttacagtatagaatagagtttatttagggcatggggaggggagttaagagggtagtagacgcagagaaaggcagtgagaaggagagagtagagaagtagaggctgtccatgaatatgtggagagagggggaaggtaatggggagagggggagcaaggggacaagaggcaagagagcaagagtaagagccactattgctttttatacaggtttgtattctgtatgtagcctaggctggcctagaacttagaatcaatctttctgcctcagtctcctgagtgctgggatttgggtgtgtacaccatagcagccaggaaatggagaacatggctgaaggaggcatgggaaagcagggtaatagtactgtctaaggaaagcgtcagcaagcagggaagtgctccagagtctcacttcctaaagacttcctcttttgggtagctttagaaattctgtgcattatttgatataaattcatatcaaaaggtactatattaactaaataattcatgtttctgaaggaatacttaaagtaattcatggctaaataagctaatctgttatgcaaataccattatgcaaatagtaaacttgggtacaagaagatagcatgtcacaggccattttacatcacggtgaaatttccatgtaggaaaaatggcttcttatataaaagtcttttaggagcttgattaataaaagggaggagcttgggggctggagagatagctcaatggcttagagcaccggacgctcttcaaaaagtccagagttcaattcccagtaagcacaaggtaacttacagtcatctctaatgagatgtgatgtcctcttctggtgtgcaggtataaatgcagacagagcacttgtgtacatacaataaagaaagaaatcatttttaaaaatggaggactttctgcattttatcaatttcttacttttttctttagtataatttctttagtaatatttctttgtataatttacatttgcattgtcttatttataatcactagaaatattttatagctcattttaaaaacctttaaggcaaatgtcttatcaaattccaacccccaaataatgataattcacttaaatctagacttaacaatagtttgccaaataattacatttttctgagcacaaatttccatggctttcttcatatatttgagcattaacctatttctattacatttatgctttagatttagtacacacagaggggcagcttcaaaatgaagaaattgtggtaagtgtatatactttatagagataagattatctctagtgagcctaattaagattttaaagtttcccagtatgaattattcatgaatagcctcatggtattagcagttctttgcctattcaaccattaaagattattctcaataatattataagcaatatgtattattaattaggctctttgaaaaaaaactaatcctggagaaagtggctacatggataaaccagaagtgaatgcttttgtttgttttattttgctcagtgatttgttttaagtatctggttacgttgttttatttgactctgtaggccggttagaataggacacagggctgagctgtcagagttggatggtaattaagcgtgaaaggacaagagaggcttagataaggggaattagagcataggatcagctacaaaccggagagctggagtggaaagaaaccaggggtttctgacagcgttccactgggctctgcttgtcaagcggactgaatgcccacggacagggaagctgctgcttcatcaggagtcggtctctgccagtttgccatgccctagttttagacaagtaaaattctccaagtgtctttagctgccagtgttggtatacagctcttctccatgacagtttgtggctttgcaccttccaggagctgttgtgaaatcagcatttcaaagactcctcagagggaggggagaactcagtccacttgtagtacaagtgttaagacttgagttccctcttcatcacacacgtgtaaacccagtgctgggaggcaaggtctttggggcttgctggtatacacacacccacagacacagacacacagacacacagacacacacacacacacacacacatactagaaactccattagaaatgtttgaatcccacaattcacttttctcccactaaatttcctccagtggggagcccagtagggtttccccccaaaaaaaattatactgaattgcttctgcattctttgatattgtgttgaggattcgatagggagagtgatacaacatttggaaagtagtaaggccaaataggaggcgggaagctcctcagacatttattactgatcgttgaccgcctccatttgttcttctagctgctgaccatagagctcaggtagcacaacagaaatgtgtagaaagctttgtatcctcttctaaacttcatattatatcccgagatttataattatgttttaaggtactgcttacctatttacacatatttaagctaatgtatgttctctgtcatcacaagcagtgacagtggacattaattagcacattctatgcacattatgaccttcaccttcttcattattctctaggaataaatttcatgggatggaattactcaggacaagagcataagcatgttatggctttttatgtctattgccaaattactttccaggaaaattatataaatgtgagaaaatattatataaatatttttagggtagtatattccaaggcattattaactgatggaaactgtttagcgtgaacagttctttacagagacaccaagagtgacagataccatgttgaatcactctcagattcactgcaatgatgctggctggcctctgaacactcttgccttatatcttgtaacatgctagaaaaatgacttttcatcaaagcctttgttttgccaaatgcttgttaatagtttgctaggattgctaaaaacatccatattgattcttttttttttttttcttttacaggcacgagatggctacgccactttcttgagattcattattgtctcagcatttgatcattttgcatctgtgcacagcatttctgcagagggactaacagtctcaagtcttccttagtaattacaacaaaatgctctgaactacttttaaaatatatttattgaaatacaaagctatctttgatatgtttactattaaatagatttgtatcactctgattccattttttttatataaaggaagaatgtgtttatttctcctttacctactcaacgtatatattacctgatatagtggcattatagcgtgaggtgaccttgggcgttgcaaagcattaagccatgaaactgtccacactgttaagtttgtttctaggcttttacagcacacaatcagaatggagtagcgtcacttgagctctgctttggggtctgggtgggagtaggtgaagcacctaccatcctcaggtatgagatgccggggtttctgatctatgtttcctggcaaggtctgctgccccacaggaactcttaacagaacaaagacaacttcccctgaacaaggagagactgaaactgcagctgtggctctcccattgctcttccttttgcaagccttctcacttcgtagcaggtttggacttgatagtttctgtgaactaagtgaagtataagctagctcctgcttagttccaaaccagcccaaaatgtcctggcggaagcaacagcttcacttcccaatcctggagcattgctcttggcttattcctgattgactgatttctctggtcagctggcatcttagtctcggtaacaaaggtttgttggacctaggtggcctcaagcagggatagttctcagagccaggaagagccttcagtggtctaccctgagcctctttgttattctgaagagaaccgagagggagaaaagcccaagtgcaagcatgtttacagtctgccctgatttccaggtcatggcacatagggaaggccagtgtcacaatacaagtctacccaagagcaagagcataagaggtgtgggagtgggggctgttgatgctacagtccttagtttcccctgctgtggcactgtgtgacgcacagagaagcctgtgagataacgctggccaaaactactgagcttgaatctaaccgagctccagagttaacttctgtcttcagttaattctcaaggtgggtgaacaaaacgacaccaagggaataaatagatgaggggctgaagtgttcctatccctgacttcactgctggtgctctggcactcttcagggccgcctttgggtagtaccatgtgatcagttctggccaatgagatgaagagtaagatacttagaggctaagcattaaattgccttggtgagacccttcaaggctcttctctgctgctcaaatggccagcaatggtctgtagcaaattcagtctgggtttggaagtgaggccgatcaatggcttacagatggtcttcatctgagttgtcttcacagggatggaaaagcttcactctgttgtgcctgggagcgtctggggctgcgtgtccttacagtctgaccttgctggtcccaagccatacacaagtgacctggaaagtcacaagtgtcagtgttgtggaaaatgttaaggaagggtctccactttagtttcagagacagagcttctacaaacacatgccctgtgtggatcttacctggaggcagcttgaacaaaccaactgagaaaatacatcttaaagataatctgggacatttgcttgtgggctgagtattgttcttctttctagatatactggatgtagcttatggtgttttgttttgttttgttttgctttgttttgttttgtttttaaaaaaaaaaaaaaaaaaaaagcctgttgaagcatggtggcgcatgcctttagtcccagcactcgggaggcagaggcaggcagatttctgagttcgaggccagcctggtctacaaagtgagttccaggacagccagggctatacagagaaaccctgtctacaaaaacaaaacaaaacaaaagcctgttgatccaggaatggtggtatatgcctttaatcctagcattctggaggcagaggcaggtagttctgtgagtttgaggccagcctggtctacagagtgagttccaggacagtcacagctatgtagagagagcctgcctctaaacatagaaaataaaaagtaaattaaaaagaaaaactgcccaggtttttccatgatatacatgaaactctacaagggtaaaaataaagtagtagctaggatttaattttaaacacggaagcagagatactcattaatttgtagcctgagcatgccaggcaaatgctttactattgagctacaccccagcccaattagagatttttaataatttttttttctggttaattgaagcagatgtttctatgatattgaatatgggcagtagatatatgggagttcaatatattagccttttatatattcttaagattgttcaggatggctgggtgtggtggcgcacacctttagtcccagcacttgggaggcagaggcaggcggatttccaagttcaaggccagcctggtctacaaagtgagttccaagacagacagagaaaccctatcttggaaaaaaaaatttcaggatgaaagagcaaaaataataataccccagaaaactatttattgattgatttgtttgtttgtctgtttgtttttcacagattatctattgaaggaaagtgagagtagggtgggttcctggggacatcttggaaaaccccttgtgcttatgttttgtatgtccttcagatagcttcctcagatgagattcccagaaggaattagatccaagccggaataccacctgactgactgatttgtttgcaagaatgaggaataacaaccagggctccacactgttaggcagaatggctcttgcactgagctccagcctcagcccagggttttaagaccttaggattcatgataaattgctcacaagaatctgtgacaccaatttactcctggaaagtaaagtttggggggctgaggggggacaaaggaagtcagaaaggaatatgaggagattgtcatcgaagatgggatggtgaatactcgcgcagagatcacacccgggaaggatgaataggaaagtccagaggagcaaagggccagctggccctcacacctgtgcagctctcaagtgttgtcctgtaacatggcaccgttactgtttttgagaatgtgacctagagcaatcgctttcatgttcaatagcatgaatgctgaagattttttctttgccaagtttttaaactgaaatgtcaataactgtttgcacaggaaactcggtgttaaggctcacagatcgctggaagggggtctctggagtttatctgatccatctctggcacaggccttgtgaattctcttgaagcagcttctgagcattcagataacaggggtcactgatggtcttgtgatactgcttcctataggactggaaggtgactcagggtggggctcagcggtagagcgtgtgcctagcagctcaaggccctgggttgcattcccagaaacaaaagcagacgactaacagagacagacaccgtgctcactctgcagactcactctgcagaccaggctggcctcgaactcagaaatccgcctgtctctgcctcccaagtgctgggattaaaggcgtgcgccaccactgcctggcgccaagtttttaatatagttagttaactgtatagacattaaaaaaaaaatccaacttggtagttgcctttattgatgtgtccccctacttttccccacaatttcaatttcttccgtctaccccaacagaagaagctattaaaagtgagggattaaaaacaaaaaacaaaaagtgagggattgttggggttctgagccccttgggctgttagaaaaggtatggaaactaaaacagtcattggatgtgacatgaagaagtgtagcaggaatggggaccgaacaagaggaaagaaagaaacacaggaaacctgtctcccccattcccctcctgctaaggggccaaggacataacctcgaacattaagggcagaccccgaagaagggaaatatgtgggggtcaaggaagggactcccctctctttatagaatgaaatgtaggcactatgtaggagtaagtcttcctggtgctcctggtatagctaatccatcatggctctggtgttgttgacagagagaaagcaagcaacatgcagataaaattgcctctggatcgaaaagtagaatcagccgactaactgcaagatgagaaggcatcagctcaaccacccaggtttcgggaactttctactgtccaagggctgctcccagggtttctttcgaatttctgtgccctgagagaggctcctctccagctgatgagcttctgtatgcaaacttcattttctccagaacgaggtgagaccaagctgacctgcaggaacccaggagactggagtactgggtcaggggccagaggtggcttccactcagccaatatattcattttggattactttttgcgagccaatgtctatcacaagttagccatacaactaaacaaccatgcagtagtcatgtaaagcaatagatgcaccaggcaggtggcttactcctgtaatcagagggctctggaggcttgaggtacaaagattgcttcgttccaggctagcctgagctatagtgtgcacccctctcagcgggaaggagagaggaagagggagagagaatatactaaggttctttttaagtcacagtaaagaattatttcagaaatggaagtcattttgtctgtctctcctttatacacactttttctaaagcaataaagatgtggatcctgtttcaggaatgcccctttgttggtacgctagctagttgatgtcaacttgacaccaactaaagggaacctcaattgagaaaatgcccccccagactgctggtgcattttctttgcttggtaattgatgttggaaaggcccatctcaatgtggttggtgccacccatggtctgatggtcttgggtgctgtaagtgaacagagtaagcaagccatgaagaacaagccagtaagtagcactcctccatggtctctgctcgggttcctgcctccaggttcctaccctgaattcccatcttagcttccctcagtgatggacttataaactgtaaagtgaaacaaaccctttccttcccaacttgtcttggtcatggtgttttatcacagcagtagaaaccctaagacagtgggcttcatcttccaagtaaggaccccacagtcctttgtaactcgagcctgatagtgagccttccaaaatctagagctatggtagtatgcatcaaagtcttaaacatacacacagcctttaacattctccatttgtaaagatatgtttgaatgaaataggtaagggatggctacacaaagataaaggttttcagcaatgctgtttgtaagttaggaaagctgcatctactaaaacaaatgatgtggggttggagagagagagagagagatgctcaaggacacacctgtgcatgcagacatggtctcaaaacaaaaaacaaaacaaaacaaaaaaacaaacaacaaaaaaagaatgccatcaaagaaatagttatagttgttgacctcaaacgggaatgcatacctgttactgactaaaaactaccagggctttggtgaaggaggaagctaagagctgacttgtaacctcccagggctagagacttatgtcccagttataaaaagcttacgcaggacaggtgtggtggcgcacacctttaacccnnnnnnnnnnnnnnnnnnnnnnnnnnnnnnnnnnnnnnnnnnnnnnnnnnnnnnnnnnnnnnnnnnnnnnnnnnnnnnnnnnnnnnnnnnnnnnnnnnnnnnnnnnnnnnnnnnnnnnnnnnnnnnnnnnnnnnnnnnnnnaggcagcaatcccttgagttctgccagtggtttgcagaacatggagaatgaccacatacaagttggcttggataacacagaagggcaggaatagggaaccaaaactgaaaccaggaaagacacatcaaagagacttctgggtatgaagtagagcaccagcctgtgaatgactcagtgggtggaggtggttgttgctaagcctggctagctggcttagggtaggttctttaaggaaagttggctatttgggggatgggggggggtgtttgttttgagacagggttttgtgtaacccaggatggcctcaaactcttgattctcctgcttccctgaggtttgagattacaagcttgcatttcactatgtccagctgacggatgcttgtcagggtgatttataggcggttctctcaggagaagtctctagggaaatgtgatggtttgtatattctggggccagggagtggcaccatttggaggtgtgacctggttggagtagctgtgcctctgtgggtatgggcttaagatcctcaccctagttgcctaggagacagtcttccactagcagcctttggatgaagatgtagaactcttagctctgcctgtgccatgacagcctggatgctgccatgctcccaccttgatgataatggactgaacctctgaacctgtaagctagccccaattaaatgtttttttttaataagacttgccttggtcatggtgtctgttcacagcagtaaaaccctaactaagacaaggagcagcagagagcaacgacaaaggctaactcaagatagctgtacccaaagtctccccttatcccaatctcccagctagccttggagtatgagaggtgccagggtatgctggtcaccttcaacaagggaccagcgtttgcacacttccagctcacactcggatggaggacagtcccttaggtgttctggtaagaaggctcttgtcagttgagggcagttctcaggaacaggggtgcctgtgagccctcagcagccagcactcactgcagctgctacgagtcactagcatagacatggcgtctgggcagagcaccagcaatatccattgaggcggcgcatctgcaagggtggtcctggaacatcagtgctgggttcatctctggaaacttgttggagaagcaggttcctcatctcatcccaagcctactggaccccaaactctgcaagcaagactcaagcatctgcgtcttaccgagcctgccaggcagcttcaacgcatgcgcaaatgagagaaccgctgtgcgatgggggcagatgactggaaactataaaacaagtaaagtcccgggataatcaaggagatgcagaacatatttttcaagagaaactacacacagaattcccagatgcaagtgatcctctggtagggtagctgggactgtaggtaggctcctgccaattcctgtgactcctgcattccaggaatatttgctataggacaatccacactggagtaggctttggtcgagttgctggacttcaagtataaagggatcaatggctttcctggtagaataaattattcaagtgccaggagaagtatgttaggttgacctgagttgcctcccccataacttagctgccagaagatcatctaacaatgtccataaatctcaggtagagattggagcgtgaggtgccttagctcactcaccgtgctttcagcttaaaggcgacagctgggttttatgaacacatgaggcttcagggcacagggtcctgtggcctctttggcaagctactggtagcttcagtgagttaaactgctggggattctaatcctggagtcttttctctgtcaatcagctaatgacacttgataaaatacacacatacatggggaaggggaaataatctgttcttgtgtcattagcccaggctaccctaaaatacactatatacagcctaggcaggtcttgacttgtaatcttcccatcttggccccctcggtgttgggattacaagagtgtgctacaatttctagactggatatactattttaattgtctctgtcctgtcagaatgaggttcaggctcagagtccttacatatggccaagtactacacagggcaccaccctcatgaacaaggaaactatgatgtgggagtcctcccttcaaatgcagacacagggacaataggtgtagcccaatgagagaacacttgtccagcatgcaggaggtctggacttgatcccattaaacaaacagaactaacgaatgggaagaagtgcatacatagtaatgtgtcagagcacaatccaagaacgcagtcatatgagaattctgagtgcttgtgagaagatgccaagaaaacaagacaaaagtcttgtgacctcagtttcttagtttttgccacctgtggcttgtccttgtgattgaaaacctcaccggtgtgattcctcccaaccctcagggtctaaattggcgctctgaaaaaagttggctattgcatgagactgtagtccatctcagtgttaggcccttctctcccagatgcacactgctaactagagccataaacagtagtgaatttgctccttcacgtcagttgatgttgagagcgaactacttctaaataagtcattagtaccaaccaatgtctttcacctaccagtaactcataatattaggcaagaaggagtttattcttggaatctacacctagagtgctctccctctctctttctctctccatcatcaattagatttaagcttctctctgcaatgtagttctgtctatctggtttattctcttgttgtaataaacactatgcaacttggagaagaacaagtttaccccatcttacagttccaggttataatccattactgaggacagtcatagcaggaaccccagacaggaaccaggaatcagggaccctggatgannnnnnnnnnnnnnnnnnnnnnnnnnnnnnnnnnnnnnnnnnnnnnnnnnnnnnnnnnnnnnnnnnnnnnnnnnnnnnnnnnnnnnnnnnnnnnnnnnnnnnnnnnnnnnnnnnnnnnnnnnnnnnnnnnnnnnnnnnnnnnnnnnnnnnnnnnnnnnnnnnnnnnnnnnnnnnnnnnnnnnnnnnnnnnnnnnnnnnnnnnnnnnnnnnnnnnnnnnnnnnnnnnnnnnnnnnnnnnnnnnnnnnnnnnnnnnnnnnnnnnnnnnnnnnnnnnnnnnnnnnnnnnnnnnnnnnnnnnnnnnnnnnnnnnnnnnnnnnnnnnnnnnnnnnnnnnnnnnnnnnnnnnnnnnnnnnnnnnnnnnnnnnnnnnnnnnnnnnnnnnnnnnnnnnnnnnnnnnnnnnnnnnnnnnnnnnnnnnnnnnnnnnnnnnnnnnnnnnnnnnnnnnnnnnnnnnnnnnnnnnnnnnnnnnnnnnnnnnnnnnnnnnnnnnnnnnnnnnnnnnnnnnnnnnnnnnnnnnnnnnnnnnnnnnnnnnnnnnnnnnnnnnnnnnnnnnnnnnnnnnnnnnnnnnnnnnnnnnnnnnnnnnnnnnnnnnnnnnnnnnnnnnnnnnnnnnnnnnnnnnnnnnnnnnnnnnnnnnnnnnnnnnnnnnnnnnnnnnnnnnnnnnnnnnnnnnnnnnnnnnnnnnnnnnnnnnnnnnnnnnnnnnnnnnnnnnnnnnnnnnnnnnnnnnnnnnnnnnnnnnnnnnnnnnnnnnnnnnnnnnnnnnnnnnnnnnnnnnnnnnnnnnnnnnnnnnnnnnnnnnnnnnnnnnnnnnnnnnnnnnnnnnnnnnnnnnnnnnnnnnnnnnnnnnnnnnnnnnnnnnnnnnnnnnnnnnnnnnnnnnnnnnnnnnnnnnnnnnnnnnnnnnnnnnnnnnnnnnnnnnnnnnnnnnnnnnnnnnnnnnnnnnnnnnnnnnnnnnnnnnnnnnnnnnnnnnnnnnnnnnnnnnnnnnnnnnnnnnnnnnnnnnnnnnnnnnnnnnnnnnnnnnnnnnnnnnnnnnnnnnnnnnnnnnnnnnnnnnnnnnnnnnnnnnnnnnnnnnnnnnnnnnnnnnnnnnnnnnnnnnnnnnnnnnnnnnnnnnnnnnnnnnnnnnnnnnnnnnnnnnnnnnnnnnnnnnnnnnnnnnnnnnnnnnnnnnnnnnnnnnnnnnnnnnnnnnnnnnnnnnnnnnnnnnnnnnnnnnnnnnnnnnnnnnnnnnnnnnnnnnnnnnnnnnnnnnnnnnnnnnnnnnnnnnnnnnnnnnnnnnnnnnnnnnnnnnnnnnnnnnn

SEQ ID NO: 885 - DNA, 610 bp, Mus musculus
ggcgtgacgggcggggatcgcgagcggacccggtcctttcgcggagctacccaaggcccaggcgagcgggctaaccattttgaaatgaggaaagtggatctctgctcagtcactgaagggacagaagtgattctggccacatcgagtgatgaaaagcacccacctgaaaacatcattgatgggaatccggaaaccttttggaccaccacaggcatgtttccccaggagttcattatttgttttcacaaacacgtaaagattgaaaagcttgtgatacaaagttacttggtgcggactttgaggattgaaaagaccacatctaaagagccattggattttgagcagtgggttgaaaaagatttagtacacacagaggggcagcttcaaaatgaagaaattgtggcacgagatggctacgccactttcttgagattcattattgtctcagcatttgatcattttgcatctgtgcacagcatttctgcagagggactaacagtctcaagtcttccttagtaattacaacaaaatgctctgaactacttttaaaatatatttattgaaatacaaagctatctttgatatgtttactattaaatagatttgtatc

SEQ ID NO: 886 - protein, 171 aa, Mus musculus
GVTGGDRERTRSFRGATQGPGERANHFEMRKVDLCSVTEGTEVILATSSDEKHPPENIIDGNPETFWTTTGMFPQEFIICFHKHVKIEKLVIQSYLVRTLRIEKTTSKEPLDFEQWVEKDLVHTEGQLQNEEIVARDGYATFLRFIIVSAFDHFASVHSISAEGLTVSSLP

SEQ ID NO: 887 - DNA, 44920 bp, Homo sapiens
ggctacaaaattcttttcaggatgattaagaaaaagagaaacaatattttaaaattccatggcatcttgcaagacctcatgaaatagtagctattactattatgtcaacaacaaaaagtgatattttaaggaaaacatacttgcctccctgttaccaccagtgggattaaaaatcactggggtttcaacacaagggagaagagagttttcgtaaggttggaattcagttgcaaagacacttgcttctggcaggtagctttgtgacttaaccccaagatagcaagtgcctgcacctacccagttattttattttcatttattttttcaagctcattacttttgacctgaacccctttgtgctgacaaaacctcttggactgcagctacagccctggattgcaaatgcaacctcaagtttcctgccctctatttgcctttaaggattcaaaaggagaagagaggtttttgataacaactgaaagtcttacatttgaatgagacagtcaagtgtggaattgctgcaataaaatatgggctaaaagattatgttggccgggcgcggtggctcacgcctgtaatcccagcactttgggaggccgaggcgggtggatcacaaggtcaggagatcgagaccatcctggctaacatggtgaaaccccatctctactaaaaatacaaaaaatcagccgggcgtggtggcgggcacctgtagtcccagctactcgggaggctgaggcaggagaattgcgtgaacccgggaggtggagcttgcagtgagctgagatcgagccactgcactccagcctgggtgacagagcgagactccgtctcaaaaaaaaaaaaaaaaaagattatgttaaaattgtttcctatattttctggctgggcatggtcgctcacgcttgtaatcccagcactttggaaggctgaggtgggtggatcacttgaggtcagcagttcgaaaccagcctggtcaacatggtgaaaccctatctctaccaaaaaatacaaaaattagctgggcacggtggcgggcgcctgtagtcctggctactcgggaggctgaggtgggagaatcacctgaacctgggaggcggaggctgcagtgagccaagatcacgccactgcactcaagcctgagcaacagagtgaaaccttgtctcagaaagaaaaaaaaagtttcctatattttctgattattatataaatgtaaatgtttcttacattttctgataatgtatcactttcattggaaaaaaattaagaaaatataggaaagtataaagaatataaaatcaattccaatcccaccatctagaccgctttttggtagatttcttttttccttctatctgtccaatacatacatttaaaaaatctgtttcttaaaatattatcttaatagttacataatatttcatcatataaatatactataatttgcttaaccaactccctactgttgaacatttagtttttagattttcacttgtacaaacagtactacaatgaacactcttatgtaaaaatatctgttcccatctttgattattacattagggatcagaatagattcttagtaagtagaattaatgggtcaaacaaatagtatggatgttttcaaggttcttgatacatattgctaaactgcttccagaaatgctacactaatttatgtcctcatcaaatgtgaatgaaaagtgctattctcatcccaatctgaccaatctaccactacaacagtatccagacatcgcaaatggataaacggcgttttcaacagcatggcaaatattaagctataagggtaggtgggggaaaaaacagaatacgagttgtacaaagtatatattcccaaatgtataaaaataatatatttgaaaatgatcatcatggtgggattatggattttttaatactacaattttatgcattccccaaatagcatgtattgctaattttaaaacaagatatacatcataagtctattttgccattgttctaacttttctacaatgaacataaacaacttggaagaaaaaatgaagggtaaaacgtattttaaatgcataagccacaatgaaatattgcttgactttttcatttaggcaaggtaatttttttcctttccactggcagcagtcccaagtccagccatgactgagaccatagcccagagacagagctttcaaggtgcctgctcagtttatgagccaagtttctattcttttctgcatgtgtttatgtcttttctttttaaaatacagtatttggcctgtggtgaaaccattaattctatgagctgattaaataaagatcatttctcctttattaagcatacgagcttacctcctgttttctgatatggctttctcttatatacattttttgttcagcccttgttataatgctcatgcagattgtgcgtcttaatagtaagctgccggctgggcatgggggctcatgcctgtaatcccagcactttgggaggctgaggccggtggatcacctgaggtcaggagttcgagataagcctggccaacgtggtgaaaccccgtatctactaaaaagacacaaaattagccaggcatggtggtgggcacctgtaatcccagctacttaggtggctgagtcaggagaattgcctgaacctgggaggtggaggttgcagtgagctgagatcgcgccattgcactccagcctgggaaacgaggaaaattccgtctcaaaaaaaaaaaaagtaagctacctttcaggtctaatcacagaatagttcatacagtggtatacaataaagctattttaaaaacctacaagtaggccaggcgtggtggctcacgcctgtaatcccagcactttaggaggctgaggcgggaggatcatgaggtcaggagatcgacaccatcctggccaacatggtgaaatcccgtctctactaaaaatacaaaaattagctgggcatggtggcatatgcctgtaatcccagctactcgggaggctgaggcaggcgaattgcttgaaccaggcagttggaggttgcagtgagagctgagatcgtgccactgccactccagcctggcgacagagcaagactctgtctcaaaaaaaacaaaaaaaaatctacaagtattgatgataaatgattttcaaattatgtgaagaaagcaaggtccataagagtgtatgcagcatgctgccatctgtataacaaagacgggaactacataagcatgtatgtgtatagaatatctctggaatggtattttaaaaactggtaacagcatttggtctctggagagaggaaactggagatgagataggaagaaggcttatgtttcattttatgccactttgtgtttgtgtttaaattgtttgccatgtatagttttattgtttttgcaagttttttaaaaaattagatgttttgaaagtgtttttacatgacggtaaagtaaaaattttaaataaagcatatgagcaaaggcagtcacaagagaaaatatctgctttgttaagaccacagaccttagtgttgggactttgagaactgccaaactttaggatatttgaaattttaatcacccaatcttttaaggtcactttttatctaatggtcagtatctagtggtctgaaaaccaaaaacaggcccaaaaactctgggtactaatctccccatctgtaagagcgtatcaagagatatttggcagatcacattttgtcttttctattttctctttgaaagctgttagaataatattttctacttaatggaggagctgtgacaactaatccttgtaaaatgatttcagaataaagttaagtgtcatctaagaggtgaggagaaggaagagtgatttttttcaatatggtcttttacttcatatttggaagttctaaactgaagtgctatttgatgagggaagcccctgagcccactaagccccagagcttgacagaattaacacacccaataaaataccgaataatctaatcagaacacccacctgtttcgcaaacacagggagcaaagcaccaaacttccataggcctcagtgaatttctgtaaagccctcagccctgcacctggctcagtgaatttctgtctggcttcagcagcagagaacagcttttcagcaatctgctcaggaaagccaataagggaatcaatgtgatccacattgtcggagatgaaacccaggacaaggctgaagagggatttggcggagtaccgaagattcccctctcgggtgtatgtgaagatgaaatgatcagtcttctctttccgtgcagtgtcgtcttccctgttcatgcaaagctccacagaaaagcctttggggaacagtctgaaaggccttggcttctgcaggctactcctgacaccatccagagccagattgaccatgtgcagctgcccattttctcgcatgtagatgggccctgggtccaggtggttttctgagctgaggtagtaagacattgccttggttgcaactgtaaaagcaaggcacagggaagcaaatccaattaaaatgccatttgtaacatgtaacttcatcttgctgtgcccagggctttatgagcctaccaggcaggcctggtggctggtttaggaaaagcaaaactcaccagttgcctgggaactttggcattcaaggttgcctctattgccgctacctggaatgccccttcctactcttccctttttcttgtttatctggccatctcccactcttctttcaaaacccaggtcaaggccggacgcattagctcacgcctgtaatctcagcactttgggaggccgaggcgggcggatcacctgaggtcaggagttcgagaccagcctggccaacatggtgaaaccccatctctactaaaaatacaaaaattagccgagcgtggtagtgcgtgcctgtagttccagctactcaggaggctgaggcaagagaatcgcttgaacccgggagacagaggttacagtgagccaagattgtttcattgcactccagcctgggtgacaagagcgagactccgtctcaaaaaaaaacaaacagaaacccaggtcaaaatctcatcttcaaaattcatgctaaggaagttgtcacagatgtcagcaaagattcatttatgtgtaaattaatggcagcaagtttatattagcaaaacaattggaaaacgacctaaatgtctaacaattgggatgttaataaatacattatgacttacacgtaccatggaatgtgataaagccattaaaattatgaatttttaaaaaacatgtttagacacagaaaaaagactagaaataaataactcccttgctagcttgacacattccacacacttcttggttgcactcggtgcactgttgtatttatttgtttctgagtctgccatctgctgctttgggctccttgagaaaaggaaccacgctgaattcatgcagactctataacacagtgtcctggcatcttatagtccccgagcagatagtgtggaaccaacatttactcgtttgctaaactttacaaagaccaaaagcaacaggattttttttatctacaaataaatacctccattacaagagctacataaaaactattctagcctttggaaacttcgtatctattaaagttctattagggcagttttaacataaaaaagtcaaacagttgggcatttctgcagtcatgtgggtaataatatatgcccaagaactaactggaatacttgttttcctcctgagtaaccatgagatttcaaaatacatgaaaaattgctatgttacataaaatgaaggtatttgaggattatttctacaatttaaagggagaagagaggtagaatatcatacatgcctgataatatccctaaaataatctgattgagttttagagtgaaccaactcagcttcttctgcatcaatgtggggccacaatgtggccctgaagccacttatgagtgtcagcacacaattaggtccgtgatcaaaaatgctgagtctctggagatgaaacaatgaacctgtgtgtgggaatcagtactatccatgtttctctcaaggataattatgtgtataaaagcacatgagagaagagtactctgcctagccctagagcctcaccctttcctgctcatctccttatgtcctactctttggccctgtcatactacccaggtaaactggccatgctctcatgtcccactggccattgctcgttctgttccctttggctggaacatccttctctgcctacctgacctagctaattcctactcatcattaacttcgtccctcttctgggaaaccttccctaacccctgcaccagtacgtgcctgtctggttttcccagagcacccagtctctcctacatagcacttaggaccatgtactatgtctgttcacttgttaatgtacccagagtggtgagctttttgaaggcaaggtacttatttgattcatctatctttctcaggcttgacatagtgcctagtactaagtaagccctcaaaagatatttgctgaactgtatgaaaggaagggtaagacctcaaaggacaaacttggtgctctcagttgtagggcctgctgatactgttgctaggagccagctccttttccaggcaacagctgcaggctcctcccccacttgccagacccttctgcaggtggcagaggcaaagcagacgatgggaatatattgctactggtactacaaggggtgggagacaactaaactaaaaaacaggggaaaaaaatcctgtcacagtgccagctcttataacccatacttttctcttgccagcatttacagcccctgctgctaaggagacacctcatttattctgagctgttcctccagtaggggtgagcatctggaccctccaaccttgcagaccttaattttgactgaggaattacggcagatgtcctttggtctttatccctgtcatttaacattcagagctccactctacttgtagatcagaaagcagacgctaggtatggccctaaaaaggactgacgtgattttaacaacagaaagacaaattctatggaacataccctattatagtggatgaatacactgtgaactccctgagcaatgacacagggtctgcccatctgtattgcccccaaccctcacccctaacagtgccttccacaaacactgttgtaaaatggacaaatggatggatggatggggtgggtgggtgaccacttcagatgaaaactagaagtctgattccatccagcagagggcacaagcagcttggggctagagtaaggaccctaacctgggctcctcaaaatcctggctgctttggcttccagggatcattttcaaaaaaaaggcacagttctggttgtttttttgtttgtttgtttttctttagattacccaccaaataccacttatctttctaaatgaggaaaaaataaatacaattttttcctggagagtaaacccacatcatttgtccagaagccactggaggaattgactttggtttgggaatcctggcgtcctttaatttctactactaaatcagcacatcctgcattctcccaaaaaggatcttcctgagtctatgaggtatgtaacatgacctaagcattaaattaacatttgaacccttcaaggctaagaaccagaaaggcaagagaattctacacaaaacttcactacttgggttcatttgtccctcactattgtactgggtggtgtattacaaatggacctggtcaggagacagggcctgttctaaaccatggtgaaaactccatccaaattgaaaaattaaaatacttagtcactacaacaataacaatgcccaatgtagatcgtagtagctgtattatatattggatcaagagtaacagcgacattttgatagtttcccagcctgctacaggaaggcagctttgtaacccatacgacagcatagaaaaatattacaatcatgtatgttctagcatttggtcaccacaagcgagccaaagttaccacgaagtgtaccatttcatcaaatgaatgaaacacagctgtattacattaaaaactcagttctatacagctttcttgaaaaaggccagacaaaattattgataactacacatgacagttttttagaccttgaatccagtttcccaagcaaaaagcatgactatgccagtcaggtggactgggattgtcagggagcccacagggtaaaattgtgagctgaatctacggctaatttgaagagaagaagaagaaaatatctaacttcagtagataaagtaagataaaaatcccctaagaataacaagttgtagcagtaactatgatgtttaatgatactggatgatggctaccatttattaagcacctaccagttgccaagcactgtgttaggtactatataaaatgatctcatgtaatctttaatgatcctatgaggtcagtattgccttttaatagacaaagagacccacggaaataaaataacttactctagaacagagctaataagtggcagagccagaattcaatctcagggccgcattactccaaagctcaagctctttccttggcatgatgctgtttctcaagactaaaaatatgacatcaaccttaaggataaaaaaaatgtgaaaaattaatctcacccacctgttcgatccctctagtattcactggatgaagcctggggggagggggtggggataagattaaaaaacaaaagcaaacaaaaaaacagtgcacatctggggaaagagctagtgggaacacagccaggacatttacaacgaggcctcccttcttccctcagccaggcccaaaatgagctacatccatataccaggagaacatctgccaacccatggccttcatcccaaggctgcagacacttttggtttatctgaaaatgcagtattcttgggaaaatttctaacataaaaacctaaacagaaactaaactatgggtagttctaaaccaccaataaccaacaatccaccttcattgttctgtgtgtccccattcttcaattttcaactttcctcactacttttttcctataatatgcactttcctacctgccttctcacccataccctttcaggctccctacttccctccaagaacatgccagtctctcccacaacgtgacactcttaccaattctagcgcttctcacaccaaaaatcctaaccccactcccttcgcccaccccagctctcctgcccctttcaaccttcagacccttccagcccttccgagcccctggtgaaaggtggcttgctgtcccacagacccaaccttccaacctccgatctcccaaccttcacctgcctccccttccttccccacactcctccaccccccactcctctccttcaccatctattcttcccttcttcccactctaggggcttccctctcctaggaccccaatctctccatccctttccttgccttctgttctcaatcttcaagaccctcttccttcacgcctcactatccccaacttggcattccacacccccaacttttcttccctgcccccaagaccccaccctctctattcctatcctatctcgtttcctccttgaacccctaaaatcccattcccttcccccttccttcttcccgctctctccccaagcatgcctctccccgagtccacccaggctaatcctgctccctgtcccacccaggccccgaaccccaattctcacacgtccccatagcctgcccccgcacccctacgccacccttaaacccatcgcccccaccagtatacctcatcctcccctcaacccgcgccccgccgtccctctggggcgtcccctcccccaccccgcccctccctaacaccccgcccccgctcccacacgcaacccggggccccgcgagcggcccggcccgcggccgccacctacctgtgcccctgcccggggcagcgagcggcagctcctcggtgacggctccctcctcccgcggcccggctgacggggaagggctcagcaccccgggcacaaagctaggaagggtgggacacagtgaaggtgggaggagggagggggctgggggcaaccaggcgccgtgggaccgcgggaccggcgggggcgggagcaaggctgggccggggaggcgcgcgtgcgcgggccccggcacgaaggcggggccggacctggaggcggggccaggcccagggcaggcgacccgagggccgagggtttggaactcgcagaggtgggccctgcgcgtgcgtgctcgcgggagggtgggtcccctgggtcctgcgggccccggggatagagctgagctgggggagggtaggcagcgcgcgccccgggactggcctggggaaaggcgcacaggagtggtttcgcatcttggcccgcgaagtaatgggagccggagagggcggggccgattgtgggcggggcctgtgggaggcgtggcgctaagagctaggggtaggaggggccgaggccgccgcgagggggcggggctgaggcggggtggggcctctgggaggcgtggcgcgaaaagctcggggtaggagcgagcgcgcccgggaactcggtggagcgagcgcgcccgggaactcggtggaggccgcggtggcggggtggggcggggctgagggcagggcggggcctgtgggagtcgtggcgcaaagagctcggggtaggagcgcgcgcccggaaactcagcggtggccgcggcgaaggggcggggctgagggtgggacggggcttgtgggaggcgtggcgcgaagatttcagagttggagcgcgcgcgaccccggactccacggaggccgcggcgagcaggcggagctgcgggtcgggacgctctgcgtggggcggggcgcaagggaggtttcgagcccggaaggtccggcgcccagagctaacgggagtcccaggtgagcgggtagcggggtaggcaggctggcaccagagggtatgggggcctggccgggcaaggcagaaggacggggatgttggtgggaagggagcaacagtggaggggtggtgaagagacgcgcggcgggaggcgtggaagggccgcggcgggaggtctgacgcgggcccgccttttcctctagaccctggaagcgccactaccagcccacgaaactctttgaggccagaaatagcgtcttgaccccccaaaagggaaaaccagttgtaaatcgaaattaattagtctaccaaaatgtaatgtaagctgtcagccgcaacgtaacacatctagctataaattgtacctaaggtcgggggcatttatatattctttacataatttggggcgggcctccacaagtctgaggctttagggccttgaactgaggaggagggtttgggatggaggtgagaaggtggtgccagggctggtttgccttggaagccgtggccctggcccctcggagacagaagccttaggccgggtccgtgttttctaaagtacaccacgttcccaatggatgatgcttgaagaaagagcgtgaggagtccagctgtagcaccagaaccaagggagctggtcagggagaaggtcctctaaggacttgacctgaagaggtttggggaaagaaggaccacaaagggcatgtgagctagcgatgaaagggtgaactggggacgaaaccagtggcactggtttagaagacaggataaggcatcagggaataccagggtcagggattgtaaaaaatggaaaggatagcaccccagagtgtaccacctttggtaaactgcggccctgaggaaattgccttgctctaaaggggtgggggattagactacctcccaaacctgcactttgttttgttttttggagacataatcgctcgtcgcccacgctggagtgcagtggcgcggtctcgcctcactgagcctccgcttcctgggttcaggagcttctcctgcctcagcctccggagtagctgggattacaggcacctgccaccacacccagctaatttttatatttttagtagagacgaggtttcaccatgttggtcaggctggtcttgaaccgctggcctcaagtgatccgcctgcctgggcctcccaaagtgctgggattacaggcgcctgccaccaggtccggctaatttttgaatttttagtagagagggttttggggtttcaccatgttgcccaggctggtcttgaacttgtgagctcaagctgttcgcccacctcggccttccaaagtgtcaggattacaggcgagtcaccaggcctggcattgtatggatttctctaaggttggttgcctcttctcattaactgcaacaaagaaccttaaagaaaaccaagtctctgccgtttctacttaagtaattctacccaaaacaggaaataggaagggtaatggtgaatatagaaggtgtgaaatgagttttgtattaaagcatgtgtttgcttctctcagaaaacttaagaatgtgaggtaagaaaagaactgaacatttggagagtacattctttcctattcatctgctccatatcaaccctaaagtgtaactctcttttaaaaaacaagttatccgccggacacagtgactagcttctgtaatcccagcactttaggtggccaaggcaggcggatcgcttgagctcacgagttagagaccagactgggcaacatggcaaaaccccatctctacaaaacaaaaaaattagccggccgtggtggtgcatgcctgtagtcccagctactaggaaggctgaggtgggaggatcgcttgagcccgggaggcagacgttgcagttagccgagatcgagtcattgcactccagcctgggccatagagcccagaccttgcctcaaaaaaaaaaagttctctccctacatctccaaccctcacatttccaccgccaaatagattactgcatagtttccccagctttacactatttatacttgggaccaataattacttgaggatgtgctgtcccgtatatgatggtatatttagcagcgttccctcccaagttgtgacagttaaaacttcagatgttttgaagtgtcccttggaggccaaaatctacacccagtccagttgagaaccactggagtacaggataaagttcattgccattaacctggcttttcagatctttcattatctattcccaatctacctttcctaaaatctgactcagcctaagagaactaccaatgcaggaatcctttctttggcttccttcgtagatttctttgccttcttccatagattatgatctcttaccgacttttcttggacgttttcagggatgaaagaaatttaaaatctttactttgaacgaaagtccttgtctctccaaagtcttcctgcttaaaatgtgcatttgttgagtccagttcacgccccaggaggtgtaaaaaaaaagaaatttaaatcctttttccatttgtgagcaccactgagagtaaaaattatagtcgcatttctatttttcacctttttctatgtaatatggtttatagatcatcatgaactttttactctcctccgaacaatatcacgcctgacaatgtcctacttaaaacgtagtacccagaactgaacacagtattctggatgtgcgtcacatgatgttagcacatagcatattgtactgttagtttcatgcttattcatcttccttgactctgagcttgaaggcaagaaccaagtcttagtcacttaggttgttttattcatctttgcactactagcacagtggttggccctttgttcaattggtgttcaaaaatgttgatggaatgtggtacttccttaactctaagatagcattccattacctttaggggcagatagagtacactgttaccttatattgactttgtggtcaaccaaacctatatgttttatcagatcagaggttggcaaacttttttgtaaagggccaaatagtaaatatttcaggttttatgggccttatggtctttcacagtgactcagctatgtcactgtaacatataatcagccataggcaatatataagtgaatgagcatagccactttccaatataattcatggacgttaaaatctgagtttcatgtaatttttgtgtgtcacagaatattttgatttttaaaaatattttaaaatgttaaacgcatttttagcttgtgggccatacaaaaacagatggcaggctagatatggctcacaggcagtagtttgctaacccctgatttagaccaacccttgtatgatggatttttttcaaaactgagtataggtttttacttttatccttattaaatatcttactcattgcaagtcgtctttctagcttgctcatttctttttgaatgctaattctgtcacctagcatatcagctgacatcccagctttgtgtctgcaaaattgataagcatactttgtgcatccttaattaataaaaatgttgagtaggataaggatagaagtcctccacaagttcattttcttccattaatcatcattctttgagtatagccactcagagttagaaatatctacctagagtactagctatcacccaattcatatttctctgtcgggtccacagggtatcttgagaagctttgtctgaagctttgttgaaatctttagaacatgttccagatgggtaggaattccatcagacaaaccgaaatatataggtttggtatagcttgtaaactaatgttactgctacttccaattttagtacttccttggttacattttcaaggttaccattttaataatgaaatttaataattttaggattttgtcgagaattagcattcaagtttatcaatctgtatttacagaattcaccatctttctcctcttaaaactaaggcttgacaatgttcatcccacactgactggttctctggtatcaatagtgtcgaaaactgtggtaagattggtagagaaaaaaggcacaaaaaattaaaatatatgtttttatttcttaccaatgttaccacacttttaatactatcaatactagtttttaaaatataatagaaagtgaactttatgctaataaacaaaaactaagaagaaatgcatttttataaaatattgatattggccgggcacagtggtgcatgcctttaatcccagcactttgaaaggctgaggcaggaggatcacttgaggccaggagttttaagactagcctgtgcaagccgggcgcggtggctcacacctgtaatcccagcactttgggaggctgaggtgggtggatcacaaggtcaggagtttgagaccagccaggccaacatggtgaaaccccgtctctactaaaaatacaaaaattagctgggcgtggtggctgttgcctgtaatcccagctattcaggaggctgaggcaggagaattgcttgaaaccggaaggcagaggttgcagtgagccaagatcgccccattgcactccagcctgggcaacaagactgagactccatctcaaaaaaaagatagcctgtgcagcatagcaagaccccatctctacagaaaaaaaaaaatttttttttggcctcccaaagttctgggattacatgcataagccaccacacctggcctctacagagaatttttttaaaaattagctgggcatagtggcatacctgtagtctcagctacttgggaggctaaggtgggaggatcacttgagccctggagttcagggctgcagtgagccatgattgctccactgcactccagccttggtgtcagagtgagaccctatttctaaaaaactaaaacataaaataatgaaaatttttaaaaattttaagaaaagtagggaaatttaccttgccagacattaagactttataccttattctgtcattttgcttttagtctgtatctttatatttagaatgtatctctggaaaacagtatttagttgtttttttaatttaataattgaatgtttattaacactcaatggaataattgatgtatttttgcttaaatctgtgttcttgctatttgttttctatttgtcccatttttctttattcttttgtttctctttttctgccttctttcaaattaatcgagtatttttatggtattccatgttgttctcctcggttgaccttcttcctgtacctctgtgtttttgtttttttgtttggctagggtagtcagggacttattttgtgaagcagagtagcagaaatagtcatgtcttatagattatccctgggagaggtttcttacctaaacaaacatgttagagtccctcccacatgttgaatagcttgggtgttaaaccatctgctaggcaacagcctttccttctcacttcgttttctcagataaagtttagagaatcaagaagttgctttttttgttattttttaatttgcaggttaaacactttaagatgagaaaaattgatctctgtctgagctctgaagggtccgaagtgattttagctacatcaagtgatgaaaaacacccacctgaaaatatcattgatgggtaagagttactatactttgttgtttacagtcttaaatcggtgaatcccttgagtacttggactgtgttttataacaacttgccctattaaacatagtttaataaatgtttggtggattacctgatatccacttttggtaccatttctgaaactaattgagttgtgtatatttaggtttttgatccttttctttataatgcctaaactgaactcttgatacaaataggtttttttagaagtggtttaccaaggcaaaaactcaaacaacttcattttatggaagtgtaaattttaaggtctggttatggttttactccgtttttcttggaataagaatgtaaatattataacttcctatttactacctatttccttactggtctaagtgatatctttgcagaactgaatgcttcattccttgctatcgtgtattgttttgcttctcccctttttgatatccttccaatttctactcttcattgtgctagagctttttctagctagatatttttctaaatattgttcttagacttcagattccaagaaaaagcagttaatgggaatgggaggactccttttttttttttttttttgagacagagtctcactctgtcacccaggccagagtccagtggcaccatcttggctcactgcaacctccaactcccaggttcaagtgattctcctgcctcagcctcttgagtagctgggactacaggcgtgcactaccacacctggctaatttttgtattttttagtagagatgggatttcaccgtattggccaagctggtctcaaactcctgaccttgtgatccgcgcaccttagccttccaaagtgctgggattacaggcgtaagctactgagcccagcctgagaactcttttttttttttttttttttttttttgagacggagtttcgctcttgttgcccaggctggagtgcaatggcacgatctcggctcaccaaaacctctgcctcccaggttcaagcgattctcctgcctcagcctcccgagtagctgggattacaggcatgcgccaccacgcctggctaattttgtatttttagtagagacggggtttctccatgttggtcaggctggtttcgaactcccgacctcaggtgattcgcccgccttggcctctcaaaatgctgagattacaggcgtgagccccctgcctggtggaggactccttttttaatagttctggcttactactttcttgaaccctctttcttggtatatgtacaatgaacagagtttgactcatagaatcatctaattgtaggactggcgggacttatgggtttattttgccaaaaccctttattttagacttgtggtaagagaggtctaaagaggttaagtactacttttaatcattgaaggcagaactggttgtaacagaggttttatgattctttgcatatcttgaagcccatgtatctggatgaaattctagcaactcagcctcttccttgaagcgtagttgtcatctttatggcaactgacttttctcctcagattcgtttatctctttgctgggctccaataacatttggtatatacctctgttaccttactttttcctttattgtagtgtttatttttaatgtttgttccctctctcaactgtgaattcctgtaagtcagagactatttctatgagtcaaacttgactaatactggaaagtaatcaaagtctacacacatacacacatacatataaacacatatatatgtatatataactgtacatttgcatagggctttataatttcatagatactttgtcagttgaccctcacagtaatcttggggaataagaagcacaaaaaagtattttcaaccccgttgtaaagatgaagaaaagaatgatcagatgacttgctcaaaataaaaatgacttgctcaaaattacacagataagcaagaggcagaatcaactgacactcgtgtcttctaacttgtacttcagggatctttgtgctacactaggttaactcaaatttagtttgaataaaaaattcaatatccactttttgcctgtgtcccttctttcttcttcttagttgtttacttcctgaaattcaggtaatagttactatcctactctgtcttggagtagaaaaattaatgtggcaactgctttaaggatacacagaactgaggagatttgccttaagttgtttgccagaaatagaggactttccagaaacactccttgattctgattggagatagattcgttttctaaggcaagatcaatttaccctgcactactttggtgatctttctctcaagcgagtatgttcatatgtttatagaacattaagattagctattatatatcacagttaatattttaggctctgtccatcttgatgaataaagacataatattttttagattagacaaaaactgttagtacgggaaaacatggaataatgtaattactgtcctgataactgaacagaatacatcggggacttttaatccatatgcagttccagaaaatataattagactgtatattgtagacactaaaagttaatttctggccaggcgcggtggctcatgtcttaatcccagcatttcgggaggctgaggcgggcagatcagttgaggtcagaagttcaagaccagcctggccaacttggcaaaactctgtctctattaaaaataccaaaaaattagtcagttgtggtggcgtgcacctatagtcccagctcctcgggaggctgaggcacgagaatcgcttgaacccaggaggtggaagttcagtgagctgagatcatgccactgcactccagcctgggtgacagagcgagactctgtctcaaagaaaaaccaaaagttattttctgttcacagttgctttatctaaatagagtaaccataggagtatttggagaaaacagtgctataaatgtgtccctacaggataatggaatattgttttatggccctgttccaaactctccattccttcagaaataagagttaaataaatagctgggcatagtggctgaggcaggaggatagcttgaggtcaggagtttgagactagcctgggcaacatagcaagaccgcatctctaaaaaaagaaaatgattatacttctacttttcctctgccgtttgtgtttaatgtgtcaatgaaaaaggggaaaagaagttctacactaggaaaaaaaaaagcaaagtaaaaaagaagagagaaaatcagtccttttggtgtagtgtagaagaatactatatttagaattaaaattcctgggtaagtgaattatgtgttatcttggtcaaagagtacatatattactctttgagcctcagttactgatctgaaaaatggggataataccacctttcctgctgacctcagaattgagaaaaaaatcacatgagataatccatgtaaaataggtgttagctataaattcgtatttaaaagaaaactaccactttgatgacttccttatacataattacaagatttagttagatgtcttttttattttttttgagacaaggtctcactctgtcacccaggctggagtgcagtggcacaatctcggctcactgcaacctctgcctcctgggttcaagcgattctcctgcctcagcctcctgagtagctgggactacaggcatgcaccaccatgtccgactaatttttgtttttttgagatggaatcttgttctattgcctaggctggagtgcagtggcacgatttcggcttactgcaacctctgcctcccaggttcaagtgattcttctgcctcagccttccgagtagctgggattacagatgcacgccaccaggcctagctaattttttgtatttctagtagagacagggtttcttttttttttttaagagacagggtttcaccatattggccaggctggtttcaaactcctggcctcataatcagcccgcctcagcctcccaaagtgctgggattacaggcatgagccaccgcgcccggcctagttagatgtcattttaaaattcaggtgatattttatgttattctattggttatgttcattgaaagcatccaaagaaaaacatgaggcaattaaaattaatgaatttcaataagtaaaatttaaaataatataaatatgaaaggagattgtaaaatattaagcattttataaaaacccagaattttgagttaggagagctggccttggctgggcaaggtggttcacacctataatcccagcactttgggaagccaaggcaggaggatcacttgagcccagaagtttgtgccactgtactccagcctgagtgagagagcaagaccctgtctcttaaaaaaaaaaaaaaagtagttctggcctttttttgggggtgggtaacaactttattgacatattattcacataccatacaattcgcccatttagaatatacaattcagtggcttccagcctattcacagagttacatagccatctccacaatcaattttagaacgttttcatcatcccaaaaagaaaccccacacaagaaaccccacacttgttatcagtcaccctgtattttcccatccatactagccctaggcaagcattaatctactttgtttctgtagattttatctattgagacatttcatataaatagaaccatacacatgtggtcttttgtgactggtttcttttgaaacagtgtcggagtgcagtggcgcaatcttgtctcactgcagtctctgcctcctgggttcaagcgattctcctgcctcagcctcccgagtagctgggattaaggcaggccccaccacatccgtctaatttttgtatttttagtatagacggagtttcaccatgttggccaggatggtcttgatctcttgacctcatgatccacctgcatcagcctcccaaagtgctgggattacaggcgtaagccacaacccccagccgtgactggtttctttctttcgttttttgtttttttgagacagagtcttgctctgtcatccaagctggaatgcagtggtgcagtctcagctcactgcaacctctgcctgctgagttcaagtgattctcatgtcccagcctcccaagtagctatgactacaggtgtgcaccactacacctggctcatttctgtatttttagtagagacagggttttaccatgttggctgtgctggtcttgaactcctgacctcaagcaacctacctgccttggcctcccagagtgcttggattacaggcatgtgctaacacacctggcctggtttctttcacttacatgttctcagggttaatccatgttgtagcacatatcagtacttcattcttatttattgtcaagatttcattgtatggatatagcacattttatttacgcattcatcagttgatggacatctgggttgtttctacttttgagctgaatttttcccaattttattttaaaataccaacttatagacccaaaaaactcagcaagccccaagctagataaatacagacattgtatcttagtcaaactgctgaaaaaggaaaaaaatatttaaaatagctagaaggaaataaaaactattatatacagaggaacaatagtgctaatgacagctgactttacatcacaaacagtggaagccagacaacaatggagcaatatcttttaaatactggggaagggagaaacaagcaaatatttaaaaaccctgtcaacccagaattctgtgtctagctaaactatcttccaaaaatgaagataggataaaggcatttttcatcacaagtagacctgcatcataaggaatgctaaaggaaatcctgcaggttgaagaggtataatattagatggaaaatcaaacctataagaagaaattaagtgtactggaaatgataaatatttgggtaaatataaaagactgcctttttttcctcttttaatttttttgaaagataactgaccacttaatgaaaaaaactgtattatgggatatattatatatgtaaaatatatgacaacaatggcacaaaagtgatgttcagtgtaaattgactatcatgaggtttttatgttgtaacctagagagcagctatttcaaaaatttctaataaaggaggtatagctaaaaaaaaatagaggaattaaatggaattttaaaaaaattattcactcagaaacaggagagaagaaacaggacaagaataggagggagagacaaaaatgaatagcaggatggtagacttatacccaaccatatcagtagttacactaaatatcagtgaggctaaacactccagttaaatatcagattgtcagactggataaaaatccaagacccaaatatatattgtctaaaagatatgcactttaaatataaagatatgaatagttgaaaataaaaggatgaaagaagatgcatcctacaaacagtttacataagaaagtcgctgtagttatattcatgtcagacaaaaatataagacaaggagtattaccagagacaaaggggacacgttatagtgttagagagtccgttcattaggaagagaggatagctgggtgcggtggctcacgcctgcaatcccagcactttgggaggccgaggcgggcggatcacgaggtcaggagatcgagaccatcctggctaacatggtgaaaccccgtatctactaaaaataaaaaaaattagccaggcgtggtggcgcatgcctgtagtcccagttactcgggaggctgaggcaggagaatggcatgaacccgggaggcggagcttgcagtgagccaagattgtgcactgcgctccagcctgggcgacagagtgagactccgcctcaaaaaaaaaaaaaaaaaagagaaaaaggaagagaggataatcctaagtgtatatggacctaataatagttctttaaactacataaagcaaaatctgacagatgaaagggagaaatagacaaattcacagttatagttagagattttaatacccttttctcagtaatgatagaacaatttggcagaaaatcaataaagacatagatgatctgaataatgtcataaccttgactttgttgacggttatagaacactataatcaacaacatggaacaagaatgtattgatgggttgtgtatggtggctcacgcctgtaatcccagcactttgggaggccatggcaggcggattgcccgagctcaggagtgtgagaccagcctggacaacatgacaaaaccccatctctacgaaaaaacacaaaaattagccagtcatggtggcgtgtacctgtagtcccagctccttttggagctgaggcatgaggatggcttgagcccaggacgtcaatgctgcagtgagccaagattgtgccactgcactgcagtctgggtgacagagcgagactctgtctcttaaaacccagcatattgaacattcactgaaatgtgctgaaacataaaataagtctcaatatatttcaagattaaaatcttagatagtatgttctctgaccactgtgtaattaaattagaaataaacaacaaaaagatattcagaaaaccccccaaaacttagaaattaaacactgcacttctaaataacccatgggtcaaaaaagaaatcagaagggatcttagaaaatctttcttttttttttttttgagatggagtttccctctgtcatccaggctggagtgcagtggtgcaatctcagctcatggcaacttctgcctcctgggcctcagcctcccaagtagctgagactaccggcatgtgccaccacacctggctgatttttgtgtttttagtagagacggggtttcaccatgttggtcgggctggtcttgaactgctgacctcaggtgagcaccctccttagcctcccagagtgctgggattacaggagtgagccaccatgcctggccttagaaagtatttctaacagaatgacgttgaaaatgtaacataccaaatttgtaggatgcagctaaagcagtgtctcaagggaaagtaatagcatatatacttatgttaaaaaggaaaaaaatgtaaaaccaataatctaaattttcaccttaggaagctagaaaaaaatgagcaaattaaacccaaagtaaatagaagaaaataaatagtaaaggtgagagcagaaatcaacaaaatagacaattattagaaaaaataataaagcctaaagttgattatttgtaaggattaataaaagttataaacctctaacaagattagccaagaaataaagaaaatgcaatttattagaaccaggaatgaaagtaatatcactacagattctaaaggaatcatatataaagaacaaatttaagctaatacatttgacaacttagatgaaatggacagatttcttgtaaagctcgacctataaaaataacacaagatcaattggaaattctggacagcctcatatctattatggaaattaaattcggtcaaatatttagggaagaaataccagtcttccacaaactttctcaaaaatagagaaggaaacatttcccaaattgttttatgagaacaacattatcctgatagcaaagcctgacaaagacatgacaagaaagaaaatggagcgcaaaatagtacaaccactttggaaagctgacagtttcttataaagttaaatatacttttaccctatgtcccagcaattccactcttagtaattacccagagaaatgaaaacatgttcacaagcacttgtacaagaatacttagagcagctttgttcctaatagtaaaaagctgcaagcaattaaaatacccaacaaaaatatcaaacaaaatcacgaatggaaacattgtagcatagttggtggtgatagaaatcagagcactggttgcctaagggaggtagggattgtctggaaggaaagataagggaaattctggagtcacggaaatgttctgtattttcattggagtattggttacataagcgtatacatttatcaaaactcactaagttatgcccttaaggtaaattccactgtaggtaaattttacttccaaaaaaagaaaagcttatatagttaaaatagaaatgattatttctgtagtcaaaaccataatatatactattttgcctatatatgacttaaaattgagtgcatgttttaatttttgtttgaacaaacatttagcatgtgtctactatgggtgagccattgtagcagttgtagggttacaaaggtgagtaagagaaagaaactggactcagagctcagcatctagtgggagccatagaaacacaggagattaagtgccaatgtagagatggaggctgagtatgagataagtgcaaaagagggaggaagtgattctgatttggtggggttagataaatgggaccagaaagtgaatgaacttatgcaaggggaagaacggtttttcaggtaaaaaaaaaacctcatgaatgaactaaggtacagaagcaagagcctgcctaacatatttgcagaattttaagtggcccagtgtgaccacagtgatggaagagactataacttaatggtggaaccagatcctacagtcttaaatgccatacgaaggagtttagaattataggcaataaagggaccactgaggcatttagatagaagtgacatcaattccgtttctgtgttttagaaaagaatacctggtagtagtaaagaagaattattaaagttggagagagattagaggcagaattaacagaaaggagatgtgagaatccagtagtcatttaattttaaaaaacaggtattcaataaaattttatgattaaccatttatatttggctattcttattttttctttaaaattaacaataggaatccagaaacgttttggaccaccacaggaatgtttccccaggaattcattatttgtttccacaaacatgtaaggattgaaaggcttgtaatccaaagttactttggtaagcaaatcttacattaattttttttttttttttttggtgctccaggtaaggctaatattttagttttcattatcctttcattttttccacaggcagaaggcatatatgtaaacttttggcaaaacactagtttttctttatagcatggaatccagttttattgctggggtgaaaggatggggattatgaggtaaatgccttgagctcagttggcctctctcaaactgcaaattcgaaacccttccaaagcacataataatttccatgcaatttactatgtaaaagtctttggcaaaaggccctattaggaacataagactccagcttgctagaacactattccatgacatctttattctagattcatttgtcctggagttatttgtcaaattcttgttgaaaatctgataactctgattatttacattggatagttgagattcttctattactagtggcattttctcaggaatttagggggataatctcccttgggacatcattctaatcctatttatttaaagataaaatgtatcagacaaaatcatggcgggaaacagaatacatcccagatggttcaaatgaagaggctctattgatggggctacttgcaaaattatggcctgggttaagggaacaaacaaggcaaggaatgatgaggccctcagaaactagctatagcaggaagctgtaactagccctggcacagggaaggaaatagtgttatcagagatctgtgagagctgaagcctgtgtaaaagggcctaataggagctgtaggcaggagaaactgtcaaagatgtcacactgaagcagggagggagtggagataaaattggctgatctcccttccccaccccagtctccccctggtgtctcccactggccaaatccaatccaatcagaagccagtgggtaaatgaatccaggtgatagagtccacagaggttagcccctcatggcacagaacaggacaaagaagaggaggaatggatctggagtggtagagactggactggagcagtggagaaaaaccagtttagaaggaagatgactgtattcctgataagtctcttctctcattaatcgtggaggttctagagtcatacctaaagtttgaattccatttctggcacttatgagctgtatatcattgaacaccttgcttggctcctctaaacctgttttctcaccagtaaagtgggttaaagtacctttctcataagattgtagtcaaaagtgaatggataaatatgtttgactcatcataggctctccataaatgtttatgaccaagaccaccaatagtagtattatcgccatacacacaaaaaaatcggaacaatgccaaattcagaaaagctctacttgctctgtgttgtatggttgcgaacatttggaagattagttacacaagactatattttaccatagggttttttggaaacatacagagtaacttccatgttgtttctgatcccagtgctctgtgtagttccactgtgcatgataatctcaggcagagggaaaaagaaatatagggacaaaaacatacagccagattaacactttacttactttgtttacaatgttagtacagaccttgaagattgaaaaaagcacgtctaaagagccagttgattttgagcaatggattgaaaaaggtatgtgtttcaccagcattgttctgagcatgaaggagtagataatattcctttgattctgcatttctcatctagctgcactttggtgaaaaaagatgactttaatgatccttgtgacacatttagggtctagaaagacccaggtttgaatacaaagctgcttcttcatttactggttatataagtattaacatgtgacttaatttttctcagtttcagaatccttattaggaaaatggtgatgatatctatcattcaaggttttggtgaactagtgtctggcatataatagacaataaatattagtttctcatcttctttccttttgtcctgattaagggtactatttaaatatcaccagcagaattgatagcctctacttaattaaacacagcatcttgccttcatatgtctattttccctttcaaaataccatgaaaataatattaaaggaataaaaagaggcataaacctacaaggacaaaagatttaacaaccagcaaactaaagcaaatgtgagagatcagtgtatattatgataaagagaaagcagattgaagagtagtaacttctttagctgaatgaactgtgttataacctaaggtcttgacaaggagcatgtcaataagaagcaagccactttgccacacaaaaccccagaaaggcctagagctcaaaggcaacaggtgccatgggaagtatgaatgagacctgggtcagaaaacaaggatgattagttgaacatctatttacagagtaatcagactctaggtaccttcttccgtcctacaaaactaggtgaccactcctttatcccacagacctccaccacaaccctcaagagacaactgcaaatatagaatgttgaggctcaggagaccagatatagtagggagtgagtgagacatggagttgaaaatacgatactagtggaagcctacatattgaatagtgggaacaccagcctccttcctgtgttctggtattaacttcagcagccaagaatataccctcagctgggagactggaacattcatctttggagaaactaaatggccctagaaaaaagacctatggatactgacaaaggccagctcatttctggtcaccttatttaagtccagtaatcaataagtgtggctcatgcacacagttttcaaatgatgcacagttttcaaatgatccacaagtaacaaaagaaagatcacaagacattaatgaagacctcaaaccctgaatataatcaagcttttagctctaatttccaatctataagaaatgtagaggatagaggaacaaattaagtgaaaccacgaatagacaagatgataaaatctagaatgtggggcctgggcacagtggctcatgcctgtaatcccaacactttgggaggctgagggaggaggattgcatgagtccaggagttcaagactggcctaggaaacatggcaagatgttgtctctacaaaaaaaaattaaaaattagccagggatggtgacatgtgcctgtaatcgtagctacttgggaggctgagatggaaggaccacttgagcccaggaggttgagactgcaatgagctgtgatcatgccactgcactccagcctgggtgacagagcaagaccccatctctttaaaaaaaaaaaaaaatctagaatgtgggacattgtacaggacaactgacctggtctcttcagtaagtcaaagacattaaaaaatgtgtgtaggggagagaaagcagttgaaggttaaaagagacttaattctgattttaataaaccaattaaaaaagacagggacaattggggaaatttgaataggaattgggtttcatattatattaaaccactatttttaatgttatgatggtggtattatggttatataaagaattattatttagaaatggataattaagtatttaggggaagctaggctcacgcccataatcccagcattttaggaggctgaggtgggcggatcgtttgatctcaggaattcaagaaactaccctgggcaacatggagaaatcttgtctctacaaaaaatatacatatatatttgctaggtgtggtggcatgcacctgtagtcccagctgcttgggaggctgaggaaggaggatcacttgagcctcagaggtgaaggttgccatgagctgagattgtgccagtacactccaatctaggcgacagagtgagaccctgtctcaaaagaacaaaaaagtatttagagatgaaatgtcaataatgtcttacacttgcacttgctttaactttttttttttttttttttttgagactggagtgcagtggcgcaatctcggctcactgcaacttccgcttcccaggttcaagtgattctcctgcctcagcctcctgagtagctggaattacaggcgtgcaccacgttgcctggctaatttttgtatttttggtagagacagagttttcaccatgttggccaggctggtctcaaactcctgacctcaaatcgtccacccacctcagcttcccatagtgctggtattataggagtgagccaccacacctggcctaaaatactttagtgaaaaaaaaaattgataaatccactatgatgaaatgttagtaattataaaatctagcttatgggtatatgtgggagtttttttatgttctctcctaagtatgtttgatatttttcttttttcttttctttttttttttttgagactgagtctcactctattgctcaggctggagtgcagtggcgtgatctcggctcactgcaagctccacctcctgggttcacgacattctcctgcttcagcctcccgagtaactgggactacaggtgcccgccaccatgcccagctaattttttgtattttttttttagtagagatggggtttcaccgtgttagccaggatggtctcaatctcctgaccttgtgatctgcccgcctcagcctcccaaaatgctgggattacaggtgtgagccaccatgcccagccgatatttttcaatttttcataactaaaaaaactaagcaaatgaaaaagtttattattaatttctggtgatagagttgtacaagaaagaaaatatcattataatgtattatttcaggagtaaataacctttagatagacagagtaatgtaaccatcaagtaggatttcaaatttgagaggaggtaaagagggagaagttgaaggaggaagaagaggggatttcggttttaaaaagctaaaattttacctaccatactatataaagtcagtaaaaaatttatcaaaaaggaataaaagcatattataatttcaggaaaaatagcttgaagagttgagaatgtttacttctaggaagcaggactagaggagaaagaaggggtaaagcagattactgattttcattatttcagaaaagggttaggaaacagaaacacagagacttctcttttaatactacggggcttttacattgtgtacattatttaatgtgaagttaattttgaatactgtcattagctatcttttttgttgttgttgttttttgagatggagtcttgccctgtcacccaggctggagtgcagtggcacgatctcggctcactgcaagctccgcctcctgggttcacgccattctcctacctcagcctcccgagtagctgggactactgacgcctgccaccacacccggctaatttttttgtatttttagtagagacagggtttcaccatgttagccaggatggtcttgatctcctgaactcgtgatccgcccacctcggcctcccaaagtgctgggattacaggcgtgagccactgtgcccggctgtcattagctaccattatagcaattaaatctttcatgtttccagaagaattgtttgatatgattaactcatgatgaaataaattaatctgctctaaaattacataaggaaacatttttaaaatttggataccagaaaagattacttcatgggccacacaattatgcatcatagtgaaagtttcactgagaaactcagctctagttgtttcccgtggctatggcaaaatggctcctttctgttagtagctggatcctcaaatgttcacttttttttcttgaaagggggattttttttaaataaatgttttaaaaagaaattttcacattttatcagttccttatatccttttactattaatataattgacctttgcatttccttttgcttatactcactaggatattttatagctcatagtttatcttttttgccttgtgtatcatatacctatttttaaattaaatttcaacatgcaaacgatgattccttcaaacctggtctcataatttaccagatatcatattttgctgaacataaatttcaatagctattctcatgtattttgacccttaactcatttcttctgttacatttatgttttagatttggtacacacagaggggcagcttcaaaatgaagaaattgtggtaagtgaatatactttatagaattaaaaattaacctgcacaatgtatttagactttaacctatctccatagtcatagttaataaatttcctcatgatattataggtttgtacctaaatcaaccggtagagaaagttattctcaataataatataagctaaatgtacattcataaattaggttcttacctttcatagagagtgacggcaagataaaacaattcatttattttttgttttatttttctcattcatttactttgaagtatttatttggtttgctttctttcatttgattctgtaggcattttagaataggaatgaaaaaagggtcgcgatgccaaaattgaatgttaatttaagcatgaaaggacaagtgagattcatataaggggaactagagcataggatcagcaacaaataagccaaagagagatgaggtggaaagacaaccagtatttttcgacaacattccattgggctttgcttgtcaagtgaaatgaatgcccgttgatgaggaagctgctgcctcatcaggagttccgctattcctggtagttggtcaggccctggttttagacaaacacaaaacaactgaatatctattaggtggtcatgctttgtttaattaaggtttccctaaatgagggttaaaatagtaccttatccattaagtttacttcttcacaacttgccagaagctgctattaaatcagtgtttcaaaaaattctgtaggaagtttttgaatcccattagttcctttctctcccaccaaaattcacccaagtactggggaggccagtgaggtcctgaaaaatgattaatgttactgaattttatcttcctgtttttttctgtctttacctagtgggttatgattagtaagcccctgctacctttcgtatattgtttcaggactccactgtggagggttacagcattatagaaaatttggaaaatagcaagggggaatgggaggctggaaatcacccagaattttattaccctgtcacaaaaacttttactgtatttattttcttctagttgttgaccatatgctgtacagttagaataataatgtgtgaacaattttgtgtcatctttttttttaacttagtattatatcacaggcttcgtaagtacaattttaaaataacatttgccagttggcatacatttaaactaattttctttttcttccctctgtcattacacagtttgtcccctctgtaatacacaggggacatctatgcatattcctgctactggtaccttcaccttttttcttactttctaagattaaatttcaaggaatagaattactgggtgcaaggttgtaaacatacttatagcttttaaaatatattggctaattgctttccagagaaattatataaatataaaaatgtagtcatgcttcagggtagcgtattctgaggcaacattaaccaaaggaaacttctttattatgaaaaatactttagaaagacactttttttttttttttttgagacggaattttgctcttgttgcccaggctggagtgcagtggtgcgatctctgctcactgcaatctctgcctcccgggttcaagcgattctcctgcctcagcctctcaagtagctgggattacaggtgcgtgccaccacgcccagctaatttcgtatttttagtagagacagggtttctccatgttggttaggctgttctcaaactcccaacctcaggtgatctgtcggcctcagcctcccaaagtgctgggattacaggtgtgagccactgagcccagctgacacttttaaaaaattagaaactgggcatggtagctcatgcctgtaatcccagcactttgggagactagctttgaggctagttcaagaccagcctgggcaacacggtgagaccctgtccctacaaaaaatgagagttgcagtttttagctccagttgctatttttcatcaaatcaaggctggtatttagctgatatgtaccacaactattatatgtagctggccttatgtgttgttatatatttagaatattactcttgcatcaagctgtttcttttgctaactgcttgttaacagttaactagcactgctaaaagcatttatattgatttttttcccatacaggcacatgatggctccgctacttacttgagattcattattgtatcagcctttgatcattttgcatctgtgcatagcgtttctgcagaaggaacagtagtctcaaatctttcctcataatgataacaaaatgctcttgcatgattttttaacaatatatttaaacaggaagttgtcactgatatactttattaaaaggatttttatcaatttgtttcagtttttatttacattcttttcaatatttggggtaaaggaattctgtttttatcaatcagcagtactggccaccatgggggaaattagaaaggtttggcttcagtatatagcttaatcaaggaagtgactgcacatgaaaatttaatgggtaatacattgcatccccacagcatccactctggtgctcttcagatcgtagtgcattaattttttaattgattgattgatgcaaaggactaagtgagcaatatagacagtaaacaatgtaagaagtcagaaaagagaaagtacttatggaagggtttcactgaggttatggaacctgaggtgggccctgtaaaacgagtgattttactttttaattaaaaaaaatatttttttgcagtagggtctagctgtcacccaggctatagtgcagtggctcgatcttggctcactgcagcctccatcccctggactcaagccatcctcccacctcagcttcccaagtagctgggactacaggtgcataacgccatgcctggctagtttttgtattttttgtagagaaggggtttcaccgtgttgcccaggattgtctcaaactcctgagctcaagcgatctgcccaccttggcctcccaaagtgctaggattacaggcatgagccaccgcacccggcctttacttttatttgttctggcttgaaaacctcagagaagggttagaaacacataatcttactttttgttgttgtttttgagataaagtcttgccctgtcacccaggctggagtaaaggctggtctcaaactcctgggctcaagcaatctgcccacctcagcctcccgaagcattgggtttgcaggcgtgagccaccacacccggccctctttctcttatttaagaatactatttcttaagtccatgaaaagatctagaagcagtgacatccaagtatcagtgagcacatcaaatacccagattgtgatctctaaatacctttcccattaattggaaccaagactctttggaggaatggccaattccaaaagtgtgacaagaaatagacaagattagcctgggacattttgttgtgccagaaagtagactaatggataatgtcaagaggatacagaagctaacatgaaggtactcttattagaaaaaaaaaaaaaaaagggcaatttgagcaggaaaaaaaattttacagttgactacaaccatactgaatatatttaaaagtgaatccatattgatagaagagaaaaaataaaagaccaaaacaaaaccctcattggactccatgggatgtaactagggcagaattactcatttgaatatttgtatttaaaaggaaagaattgggcatctatcatgtacagacataaccctggtagatgagagaaagtgctttgcagaagaattcctgctcattgatgtggaagatatgatagaattagagaatcatcattagtccaggcatggtggcccacacctataatcccagcactttgggaggccaaggtgggaggatggcttaagctcagaagttcgagaccagcctgagcaacatagctagaccccatatctacaaaaaaagttaaaaataacaaaaccaggcagagtggtacgtgcctgtagtcagtctcagctgcttgggaggctgaggtggtaggtttgcttgagcccagaagatcgtggcttcagtgagtcatgattgtgccactgcactccagcctgagtgacagagcaaaaccctgtctcaaaaaaaaaaaggaaaaaagttattgatttgcatgaaattaaacattgatataggcaacaatcagtggatgagcattaattgaaagattggtggggaactttacaatgcagggatctgaatctattgatttattaaaaatggattaaccagtgtatcagttagcttttgctctgttacaaaccacttcaaagcatagtggcttaatgcaacaatttcatttgctcacaattctggggatatgctggcagtttttttctggcttgtgcttgctttgctgtatctgtggtcagctggcaactcctatggtctagatagtgtaggatgacttcactcacatattttaaggtttgcaggttagggatctaggtgcctcagcaaggactgttcatctctgctccaagttgtttcttgtcctccagggggctaacccaggctttttcagatgatggtctcagccttctgaaaagtagcaaagagggaaatccccagtgtgcaaagttttctttttcttctgctatctctaaatacagtgcaaatggtctttgagtctctgtttgccatcagatttgctgttgtctgcttgccaaatcatgtcatgtgtccaagctcagagtgaaaacaagaggtacctgcccaagggcatgaatacaaggaaatctgaaaaaaagggccaagcacggtggcccatgactgtaatcccagcacttagggaggccgaggtgggcaaatcacctcaggtcaggggttcaagaccagcctggccaacacggtgaaaccctgttttctactaaaaatacaaaattagccaggtgtggtggcatgcgcctgtagtcccagctactcaggaggctgaggcaggagaattacttgaacctgagaagcagaggttgcagtgagccgagatcacgccattgcactccagcctggacaacaagagtgaaactacatctcaaaaaaaagaaaaaatgggctggggtgagagggagccattaatgctacaatctactacagtcaaacacagtatgcttcctgatgtgattttatgtgaagcacacagaccagcctatgaagtactcttgccaaaattactgaacctgaatttaatcaaactctagagataacctccattttcaggaaactcaagagatagaggaacaagtaaagcgacactgcaaggaatcaaatacactagtagccagtaatacagcttactgaaatgtccagatttgtgcttttcctggacgtggcaagataatacttctggcatttgcttaagtagtgccatgtgaccagttctggccaatgagatgaagaataattgacttcgaggctgaggcatttgattgcctatgtgagacccttcggagttcttttcctcctgtgccgtaattgaccaacaatgttctacacagtaactacttttatcagtctgggtctggaagtgatactgatgtttaacaggtagcagggctcctcaaatctttcctagtaattataacaaaatgctcttgcatgattttttaacaatatatttatttaaacaggaagttgtcactgatatactttaaagtatttgtatcaatttgtttaagtttttatttacattcttttcagtattttgggtaaaggaattctgtttttatcagtcagctgtagctcaatctgagatgggtatgtaggaggagtaagaaattaagcttcattgttttaagccaatgagattttggaattgctcgttaccacagtataacctagcctatcctaactgatagacaagtctagaatgtggctcatcctacagggcaagcgacctggtttcttcaaaaagtcagtggcataaaaaatgttaattaaggaaaggggcctgctctaaattcaaggagacctaagagctcctatgaccacatgccatgtgtggatcgtgatggatgctgatttgaatagacaaactgaaaaatgactttttttttttcttttttgagacggagtttctctcttgttgcccaggctggagtgcagtggtacaatctcagctcactgcaacctgtgcctcctgggttcaagtaattatcctgcctcagcctcctgagtagctgggattacaggcacctgccaccacgcctggccaatttttgtatttttagtagagttgggggtctcaccatggtggccaggttagtctcaaactcctgacctcaggtgatctgcctgcctcagcctcccaaagtgctgggattacaggtgttagccactgcgcctgaccaaaaaaggacattttaagataattgaggaaattttcttgtagactgggtgttattccttttactatgtgtgatactggctttaagcttatgtaataaaatgcatgagcttaaatgcatatagaactatgggtgactgaaatgcatataaagcatatgagatgcatatagaactatggatgactgaaatggcctgataatctggaatttgcttactatttaagcagagcctttataaaggaaagagggttagttgaagaagcaaatgtggcaataaattattgaatctgggtgatagatatatggaggttcattgtaggagtatttctacttatatatgctttaattttatttattttttttttttgagatggagtcttgccaagtttttctttttttttgagatgtagttttgctcttatcccccaggccggagtgggatggcgctatcttggctcactgcaacctccgtctcccgggttcaagcgattctcctgcctcagcctccctaggagctgggattacaggcacctgccaccacacccagctaatttttttgcatttttagtaaagatggggttttgccatgttggccaggctggtctcgaactccagacctcaggtgatctgcccacctcagcctcccaaagtgctgggattacaggtgtgagccactgcgcccggcccggaaaagcaaattttaaatggagaagagtaggaaaggcatttcaaaagccaccttggtataccagataagagatgtgaaggtgagtagtcattcataatgatgaatttggggaaagatgaataaaaaagtctgagtagagcaaaaagtgaaactaaaactgaacattacggctagatcacaggctttcaggtattttcttgtaacactggaaccatttaaggtttttgagaaggaatgtgaattatagcaattgtgttcatgttcaataaaatgaaatgctgagcattttctttttgccaagtttctaaattgaaatggcaataactctttgtgtaagaaacactgtgttgaggcttacagattgctaaaagggatctccagaggttatctgattgatttctttggcacaggcctggtgagttatctttaagtcttttttctctgtcttctgtggatgcaggaaacaattgatgactgtagaacacccatttcatatacggtatttgaaaacagcatgctttaaacttcatttttctaggctttaaaaaactcattctcattatcaccttaaaccactccacatttcaggcaatagatatgatatgtagctttacctttttgctttgttttgtatttcactgctgaactaccccaatcacctctttttttttttttttttgagagcaggtctgttgcccaggctggagcgcagtggcacaaacacagctcacagcagccttgacctcccaggctcaggtgaccctcccacctcagcctcctgggtagctgggactacagacacatgccaccacacctggctaattttttgtatttttatagaaatgtggtttcaccatgttgcccaggctagtctcgagctcccaggctcacaggatcctcctaccttggcctcccaaagtgttgggaatataggtgtgagccactgctctcagcccctcacctttttaaactctcatttgtcctcaactggcatcctctttccctttcatgtggccttttctccacctgcccatggactcctgactgccactgtgctgtgtgtactatgtattgaggcctttgtgtttgctgtttcctctgcctgtagtgctcttgccactggtgtcagtatagctggcttcctcattgacatcaggtccttacacaaaatttccttctcaataagcctttctctggcctccctattaaaattagagtgttcctgcaccttaccctcgcaagacaaacacattaaatctttcttccctgttttatttttcttcttttcttaggttagggacctgacgcagtcaccctgtgttctgtatttaggagttcttatacctgactcttcatttctatcattaaaattccacttaaatttttttcttttaatgatattaatgatggcccaagtatcctttgaaagatgagggcagtgccacctgcattcaggtgtgatcctcttgagtaggagatttaatccaattgaattactcggggctctctcacccttatagggacagccctgcttataactgtctaacgtattttttctgtttaccatgtatatcatgtttatcatctctctcactagaatgtaagctccccaaggcagggggtttttttgcttctgctcatgactgtatcctcagggcttagaatagtgcctggcacatatattctcaagaaatatctgttgactgaataagtgaacatcgttcatttatttgcacgcctatatctctttatactgtagaatctttgaggagctttgaataaagctagtcaacaatatatgaatttttggatcacttactgtggaccaatgcctatcacagcgccttgcataaagtttaaaccagtaaatacttatttaaagcgatggataaaaaagtaaaaatttaatgacctttttaccatgtaccaagtctaggcaaagaaatattacagaaatgaaaattgtgtttatcactcatttatacagatttttttttatagcatattgcatttgttgagccctctctcaggaatgcctctctgcaggggtcaggctgggggaggcatcctttgtgggcttcaccttctaggtgatgttccagcaaccctttgtaacttgaccctgatagccttctgggagatagtgtgtggcagtgtacatcaaagttttaaacatgcatgtagtctttgacacagaaattccatttctagaaatatagcctaataatcagataaaggaatatacaaagataagtggacaaagtttatagcaatgatgtttataagacagaaaaactggaaactactacgcagccatatattagaaagtatgatatatacaaacatcattttataatgggatatgaattttatatatatacatatatatgtttataaatataaaaatggatacttctggttaaagatgatggggtaaagcgatttttactccatcccctttctcaaaacattcacaacaaaaagaattataaaaagaaaaacattttatcttcaaggaagcagctataatccctaacatcaaaatgggacgcccactcactaagtactgtgaaatgaggattttggtgaaggaagaagctgagaactggcatatgttctctcaaagctagagactttattaaacgtgtcatggttatgaaaggcttatccaacagtcccttgattagattgaagagggctgcaggtggctcaggaggatggagaatgtctccagagagcctcgaggttaataacagaatggcagggaagatggagctggagagaatcaggcaggatacaccagaggagactgctggaggtaaagcatgatgaaggaagttgtcttagctccagctgctgtaacaaaataccataaactgggtagctgaaacaacagacatttattttctcaccactctggaggctggaagtctgagatcagggtgccggcatagtttctggtgaaccctttcttcctgcgttgtaggtagctgccaccttgctgtgtgctcacacgagctctttgtgtgtgtgtgcagagagtgcactctggtgtctcttaagggacactattcctgtcttatcaaggccacacccttatgacttcatgtgattttcattacctctatataggccctgtctccaaataaaaggaggttaaatcttcaacatatgcattttgggggttagaggggcacaattcaatccatagcagaaggtgaaaaagcatccaaagtaaagggagtgtaactgaaggggatttccctgagccccatctcaaaggaaggaatttagttaataataggctactcaagacagcgaatgtcaatgaaagttgcagattgcgccacctgactcctcatcccacactatgtttcagcagataacaagccccactaatgaagactcataatcagaaaagacccagaaggggactgctctgggtcaggttctctagaagcagagcctccaacaaggattctttgaagagtgatttattgagggagcgctctcaggagaaacctctaaggaagtgagagaagcaggatcaggcagagggaaaaattaaacatggcttctgctgaagtctagcctcagtctgatcccatagggagctctgaagcatgactggcaccggagaagtagactgccccaccttgcagcaagggaaaaggctttggaatttcaaatccatcagtcactggctgtgggccacactcaggtgaaggacataatttcacaggtatttctgggtaagatagctcctgtcatgagggcaaattctcaggaaagagtgcatctgtgagccattagcagccaacactcacagcagctggctcatgagtacaatggcttggtaaaaggcatctgggcagagcaccaacaacacctactatagcagcggttctcaaagtgtggttcctgggacagcaggatcagcctcacctgagaacttgttagtaatgcaaattccctagctcaacctcagatctgtcgaatcgtaaactctggagatgagaaccaagaatctgtgttgcagcaagccctccaggtgattttgttgcatgcccaagtttgagaaccattgaactacactggcctatggctagcaactgtaaaacaaaaggattggaattgaacccaaacctcttgcagtctcctgcacatagcccttttcccacctttgcccttgtagttctcctcacttgaaatgcccttctcccttcccatcttctccaggctcccatcccaaattatggaagtactgggcatctttgaagaccagctcaaatgccaccagctccaaaaagcattgttggattcacccagctcagaggattgctgtctcctctgtgccctctgagcacttagtcttcactctaacatatactccaccttgagttatggtcattggagtgtatgtctggtcccctgtgagattaagctgctggaggacaacagctcttcctcgtccatctttgcataactctgcacccagaaaagaatcaatgctcaatgtttgatgcattaagttgaagagaatctaattggaaagccgggggtctatttttgtcattctgaaaagctcctcagttccagctactattatttagtgaaaatggggagatttctgtgcatttgtagacacgaattggaagaccatcagagaagtgattcagaagaggcttgccttacatcctgtctccttttgtgcaacttagtacttaggaggaacagtgagtgctcatctgtgcttcagtcccatcattgtcacagcttctcattttcagtatagcctcacaaactcatgcctatgttggtcatgagtggctttggtaggatggggaatttttattcagcatccatattgtcttgtcctccttccacctccaaccccccaaaaaagggcccgaggaagcagttgtgggacaataattatgataatcgtaataatagccaacacttcatgacactttctccaagtcaggcacagttctgagtgctctactcatgaatctatggactaggcactattgataccctgttttataggtcaagataccaaggcagcttgatcaaagtcacccagctggcaggaacagagctaggactctggccttgaagttagagatccggtttgaatctcggcttgttacttactagttctgagaagttatgcaagttacttaactctctgagccttgatttcctcatctgtaaaatggggataatcatctcctctttgagatatatagagattaaatgagataacatatctgaaagtgactgtgcctggtagatg

SEQ ID NO: 888 - DNA, 559 bp, Homo sapiens
agggccgagggtttggaactcgcagaggttaaacactttaagatgagaaaaattgatctctgtctgagctctgaagggtccgaagtgattttagctacatcaagtgatgaaaaacacccacctgaaaatatcattgatgggaatccagaaacgttttggaccaccacaggaatgtttccccaggaattcattatttgtttccacaaacatgtaaggattgaaaggcttgtaatccaaagttactttggtaagcaaatcttacattaattttttttttttttttttggtgctccaggtaaggctaatattttagttttcattatcctttcattttttccacaggcagaaggcatatatgtaaacttttggcaaaacactagtttttctttatagcatggaatccagttttattgctggggtgaaaggatggggattatgaggtaaatgccttgagctcagttggcctctctcaaactgcaaattcgaaacccttccaaagcacataataatttccatgcaatttactatgtaaaagtctttggcaaaaggccctattagg

SEQ ID NO: 889 - protein, 74 aa, Homo sapiens
MRKIDLCLSSEGSEVILATSSDEKHPPENIIDGNPETFWTTTGMFPQEFIICFHKHVRIERLVIQSYFGKQILH

SEQ ID NO: 890 - DNA, 585 bp, Homo sapiens
gagcccggaaggtccggcgcccagagctaacgggagtcccaggttaaacactttaagatgagaaaaattgatctctgtctgagctctgaagggtccgaagtgattttagctacatcaagtgatgaaaaacacccacctgaaaatatcattgatgggaatccagaaacgttttggaccaccacaggaatgtttccccaggaattcattatttgtttccacaaacatgtaaggattgaaaggcttgtaatccaaagttactttgtacagaccttgaagattgaaaaaagcacgtctaaagagccagttgattttgagcaatggattgaaaaagatttggtacacacagaggggcagcttcaaaatgaagaaattgtggcacatgatggctccgctacttacttgagattcattattgtatcagcctttgatcattttgcatctgtgcatagcgtttctgcagaaggaacagtagtctcaaatctttcctcataatgataacaaaatgctcttgcatgattttttaacaatatatttaaacaggaagttgtcactgatatactttattaaaaggatttttatcaattt

SEQ ID NO: 891 - protein, 144 aa, Homo sapiens
MRKIDLCLSSEGSEVILATSSDEKHPPENIIDGNPETFWTTTGMFPQEFIICFHKHVRIERLVIQSYFVQTLKIEKSTSKEPVDFEQWIEKDLVHTEGQLQNEEIVAHDGSATYLRFIIVSAFDHFASVHSVSAEGTVVSNLSS

SEQ ID NO: 892 - DNA, 583 bp, Homo sapiens
gggaagggctcagcaccccgggcacaaagctaggaagggttaaacactttaagatgagaaaaattgatctctgtctgagctctgaagggtccgaagtgattttagctacatcaagtgatgaaaaacacccacctgaaaatatcattgatgggaatccagaaacgttttggaccaccacaggaatgtttccccaggaattcattatttgtttccacaaacatgtaaggattgaaaggcttgtaatccaaagttactttgtacagaccttgaagattgaaaaaagcacgtctaaagagccagttgattttgagcaatggattgaaaaagatttggtacacacagaggggcagcttcaaaatgaagaaattgtggcacatgatggctccgctacttacttgagattcattattgtatcagcctttgatcattttgcatctgtgcatagcgtttctgcagaaggaacagtagtctcaaatctttcctcataatgataacaaaatgctcttgcatgattttttaacaatatatttaaacaggaagttgtcactgatatactttattaaaaggatttttatcaatttgt

SEQ ID NO: 893 - protein, 144 aa, Homo sapiens; identical to SEQ ID NO: 891

SEQ ID NO: 894 - DNA, 556 bp, Homo sapiens
ctggaggcggggccaggcccagggcaggcgacccgagggccgagggtttggaactcgcagaggaatccagaaacgttttggaccaccacaggaatgtttccccaggaattcattatttgtttccacaaacatgtaaggattgaaaggcttgtaatccaaagttactttggcagaaggcatatatgtaaacttttggcaaaacactagtttttctttatagcatggaatccagttttattgctggggtgaaaggatggggattatgagtacagaccttgaagattgaaaaaagcacgtctaaagagccagttgattttgagcaatggattgaaaaagatttggtacacacagaggggcagcttcaaaatgaagaaattgtggtaagtgaatatactttatagaattaaaaattaacctgcacaatgtatttagactttaacctatctccatagtcatagttaataaatttcctcatgatattataggtttgtacctaaatcaaccggtagagaaagttattctcaataataatataagctaaatgtacattcataaa

SEQ ID NO: 895 - protein, 37 aa, Homo sapiens
MFPQEFIICFHKHVRIERLVIQSYFGRRHICKLLAKH

SEQ ID NO: 896 - DNA, 98638 bp, Mus musculus
  misc_feature (1)...(98638): n = A,T,C or G
gcagaagccagggtctgaagctggatgatctggctctggacaccaaggcaattgataagcacacactacatcacagagcaatgaaaacctgtttgagttcttatatggatgtgtgagtttcatggccaagagactcagccctcatggtcctgggtctatgtttggggtcaagacaatgccttctctacagaaatggactcaggatctgaccaggaattgccattggttgggtttccctgaccatccagaggattcccacctttatatgttatcaccatggtcagcattttgcacagagactacattttacacgattacccaggaagctatagatgaattagtggtcttttcagcttccactgagatctgaggaaagtcagaagtcaaggctgggatatctgaccttatcgggggacaagatattgaggcagaggtcagacctaggctagagagaagaatagcacaggaagtaacaacaacctaaccagaagactgtgaacatggagcaggatctgtgttccagaatcttctctctgaagatccatgaacttctggttcatgtgagacttctggtgcaaatgcatcactttgcctcggggagatgagctctgactctggatcatgaaggaggtagagacctgggtcaggagccaggtgggactagaaatggagcccagtggtcgagcacttgtgtgacaggtccccttcctggagtctgtcctcgatccccactcagtctgacctgtgctgctgtcttttcacgaataccatagtgtcctcttatctcctcttcactcagcttcaccgcattgcttttctttatggttttctgtgtgcatgctcagttcacagactcccccaccttagcccaagatagagagcaggaagaggggctcagtagatttttctgccagctggccttgtgatctctgtcagtttccgggatctttgaggttattaggaacacatgtggtgcacatacatacacacaggcaaaagcactcatgcacattaaatagatagatagatagatagatgatagatatagatagatagatagatagatagatagatagatagatagatagatagatagatagataggaatttggctgagatgaagacccaggtattacgccataggagcagttctgactctgaaccattcgagtgcacgctggacagagctatttctaatctcattaagacgtttccatctcttcaattctactggagcccaagatccctgatgaagagcccgccccccccccgccccccatatgcttagtaagaaggttaagggattctctagtctgctgcctcccgtccctgccttccaaagctggttaccaagtatggacaacagagggcagcattgagcttcacacagcggagccattgccttgtgctctcagacccattgcaaactgcacttccttcccctcttcagatcctccagctccaatccatagatgaggaaatcggttcttggaaggacagagaggaggatgcaggaacaagttaggcaatttgacgctgggttaaagttcgcaggttttaaggtagagggagtagaatttttgggaagatgaaattagctacaggaaagagagcaggggatgccaggtccaggggctgagtaaataggaagtactgtcatggggacagaccttcagggctggcttttctctagtctattgagctaatgcttttttctccttattcccagtccagcttcatccatgactttaatctctgtcccattacacagcaacaccgctgatctgagtgactgtgttccccagttcctctgtgggggcctccctgaggtcagtgttggggtgcacataggatcctctggaacaggacagcttctactcccttcccaatcttaacctggcagccaaggaggcttgatctgggcttgggtaggtcctgctttggctctgtcactgtgtgaccttgggcaggaagcccagttcctccaaacatctctaagagggcactaaagattctgccacggactctggaggttgcagacctatagaggtgaggagcaggtggaagggacttgggctccctaagctatgagtgtgtgaggcaggaggctacctgactaggtgtcagaatccagagttctcagggaaaagctggcctctcggtgggagtctgtgagacagcaacagggtgggtcattacctcagaagagtttaattcacaagcaagaaaagttcttggtgtgaagagatctatctctacagccgctgggcctgaggcctcgcacccacaccctttgagaaatagggttgccagagttcgagtttggtggactgctgataagaactattgcctcagttccagcctcagtttcccctttgacggcgtggggaagaggtccccgtgttcccagcccttgctttctcctggaaggcttcaccagtgcagacctgcctcgcccctgcagcctttcccttttccacccagagtcctgctccgcagacaggaccgcagagcgggcgtctgccctccggggggacctggacccgagggcccggtggtgcggactccgccaggcgggcccgatcgctcccgccgcgctgcagctcgctctgcgcacggccgccccgcctgccgcgcctccccgggcgcccgcattaaagcgcatatgcaagccatgaattatcaactgaaaggagtcaattaccggctctaaaaacgagtgtctgcgcccggagcgccccgggccatccgcctatttacggagcgatttcccccgccccgctggggaggaggccacgggaggggggggggagagttgaagccacggagcccgaggctgagggagagaggtctagagacaggagtgggagatgcggggggtgggggtgggggctgaggaaccttaaggagtgagggtcgggaagggagaaaaacagccccggccccttccatcttcaaagcagtgagtttgaagtggggtcctagggactttcaagccctgaatatctgtttaaggacccagccctggaaagggtggcctctagactagacctggagaggatgagcatcctctccaggaggttattccatccttgcaggaaagtgggggagcaggctgccgcattgtccatgaggagcaaccactggggaaaaggcaggaggtgtgaggaacagggacccagtgttggtggagtccaaagtgggggcgtttgcattgcccctcagcagtgacagaaaaaatagccaaaccaatcccactgtgccctggaagttctttgacctcctcacccactccaggtactctcctccggaagtgcttttcttgcctgcccgttgtttgtaccttcttctgtacatgcacctgcctccagtatagcactcactaactacatcctattccttaatccggacctgacttctctagcaggcaatgggcaccatcatggttgtctgtcttgctcagtactgcatttgccaagggagctctgtaaaacttttagcaggcaggcaggcagggagggagggagggagggagtgatggagggaggagtgaagtagccagaggggacttaggcctagatgtgaccaggacggcaaaatgcatagacccaaaacaggcctatgggattggactgcttcagacttgcacagtgtgtgcgggggtggggtggggggcgtgagtgggggttgggggtgagaggggctgaggacaggccagccctttctttgcagcaagggacaggggaagtgggagaggaagcaggaagcaagagacctgaggccttgtgcattagcccagcagtcactgccagaggcccttggctttgccctgagtgcttcagggcccctaacatcctagatttcctctgcaagcacagacagggagccctcagaaatttcccatagacctatctatgctccgagctgtgagcttgcaatcagcctttcttttctagggtgtgcctgtgaccaggcctctaaattcagagcttcaggtttcttattgagcacaggtgtggggacatcctctagttgtcacactttctcatcaagggcagccctgcccaggagcaagaatagctgccactcaggctttcaaggtgccaagcacccagcaatgggttgtggctcttaaaagtaactggaaatttctacgtcaagtcaatttgcaaatggtgacattcctaaagaggctgggattaccaagtgatagcatccagttttgaaactggcctgacaacagagactttagcccatgtccccgagtctcctggccctagtccatatacccacaagcccactaagtctttccagtcagctgagtctagattcccttcggtgaggagtgtagtgggggtggtgtcacaggaaagcaaggtagttctggtccagcagaggtggcccctggagtcctgttcctgctatcgcgtgggcctgtcgagtctctgtcgagtttgtagccccaccatgccattaccaggcagccagagggggtgtctgcacgcaccaacgctggggttcctgaggccgcttgcctattagttgctggtggcttcatggtgatttattggggcttcttcatttccccttggtccgctataaacatatttataccaccagagtgaccgataaatttcccttatgaatcccgttatctcccctattaaccatccgtcaccttttatgcggccacaatgggccaggccagggcactggggctgggtgggaggcctgcggcccacaacccctgagcccagtgaactcttcacctcccccactgctcatcaggcagggcagctgctgctatttctgaactgcctttaggatgaggacaggctggaccaggcttgaggagagatgaaggtgaccttgaaaggtggctttctctaggatctaaggatgggaagtcccttttagggttaacttgagtcttctactatggctctggctttgcctccttctaagcatacagcatcctcacaagctgtcgctgctttgcctgtttgcctcatccacagctctcagccttactcctagctgtaagcggagacacagtgtgatcggagggatccgatgccagctgtcatttgttgagcctcctctgtgccggtcactttatataaggatgccatgtgaccctcctcacggcctgaaggctaggcatttataatcccagtttctaggagagagtaaggaaaccaccctcagagacattcagcaaggagcctcggatcacctagaagagctgtgctttggggaaggctttctgtccctaactctggtgtttccagtctgtagacagcctcctcacaagccttggaagggacgaaggtgggaaggggggtgagggacgagactcggtggagggccagtgaaatgaaaagggcactgtagaattaggagtcacctccttttctttctagttgggtactacctgttaagtgaatcttggtttaaaaaccttcctgtggcagggaagagaatcaacagtatgtgagccaagcagtggccgagttgaggaggagaaaagaatgtatagtgttctgggcctcgggtgctccccagtgctccttagaggatcactgaagggtgcctaattatttctatgcctagtaacagtatcttgagtggtctggagatggctggggtagagggaattaggggtcttagtatcccaagaaacagattctctcctgacaagaggatgtaaggaagtcattttggctatacctttaactgtcatgatccatttgtactgtcttcctcacaatgatacctagtgggcacagaacccattctgggagaaaggagtcctgggttcagtttctactttgtccccaacccactgtggtgtctgaccctttcttggcctcaccccttagaaaagctctagttcagactccaggccccatgcttttctaccccgtggggattgtccctcctcagaccagaactcctgaagtgggcgggggaccggcagggacaagcaggccattgccaaccggtggctctcctgcagttgttagctgtgctagcagttgctgcttccccctctcctttctccttcccacaccgttccaccacctgtgtgtctgtctgactttgtgcatggccaggcattaaaccccaacaaggctgtcctcccttgaagaaagtcaggtcttgagcatacgtaaggcggcaatgtgcacatgccctccctcctcccttcccacccctcccccctcttgctctcccacactcacacacatacagtctccctcagtcattttcaatgtcataaatttccacgtctctcctccacacggctattacctgcgcctccgtcaccgggcagcgctctcgctcccagatgggctaggccatctccgctctgcaaatgactaagggagagagagaggcagggaaggagggagaggaaggaacagagagattgagagagaatgaaagaatgtgggtgagcagagccagactgagtagaaagggagggggaaggcctcagggagcagttggttccttggttccttttccctcctccaagaactgaggtcactgcgtgtggcctgggagctgcagtctggaggtggtgtcagttgccactctgccctctggtacagtgggcctcacacagctcttccccttcatgcccattcctctagggtgccagcttgcaggggtcggtgggaggtagggcgctgctgcttccgaggagagctagactgagagggataagagcaagacttttctcagcaacccagcaaggaggaaagaaagagagggtgaggaagggcccctgagagagctagagaggccaggctgaagagagtggtccccacaaaaggtccttcaaggctgccaagacctccaaggtactgctgagaaagccctaaggaaatacagtctactggtgctgtctcaagtgaggaccatgtgtgggacactgggatgtcaagaccctgcacctagagctgaccccatcacctcctgaaagacaccatgactacggctatcagtacttctcactgagtctccatcctagactgaccatggggtgggggtggaggtaggggtgggaggatgcaaccatggcctgctgtgttccttctctctctctttgagatgggtgtgtgtgtgggggggccctgttcttccttctgtccctcctccagctctgcctcccagcagggcttagactgtgtccctgctctcctctctccacagagatccatcatttccaattcaaaagtcactataactaaaagctgagcctggggctggcgagatggctcagtgggtaagagcactgactgctcttccgaaggtcctgagttcaaatcctagcaaccacatggtggctcacaaccactcataacgagatctgaagctctcttctggtatgtttgaagtcagctacagtgtacttatgtataataataaataaatcttaaaaaaaaaaaagctgatcttgaccatttccagtctccttttagaatttactatgtagcacagactggcctcaaattcatagcaataccttctaaatgctggaattacgacaagcgtgaagccccgcccccccaagaaaccttaagaaagtaaacatttttttcagcaataactgtgtaagttagcacatttaagtaacaagttattcaaattaagaattttacatatttctttaaaccttctgacaggggacagggagatagctcaaaggataaaagcacttgctttgcaaacatgagggctggagtttggattcccatcactcacataaaagccaggccagctacacacacacacacacacacacacacacacacacacacacagccataccttccaagagcaaaactgaaatagtttctggccctgttctcccttctgtccctcctctggctctgcctccctgcaggacttagactgtgtccaaggcctttgactcccactttcccctctccacaggaatacatcatctccagttcaaaagtcactataacgaagctgacctgaccatttcagccagtgacatgtcattcccttaatctttgccacagccatccaaatggttactttgtagcatttccctgctctgtcattatctgtttacttagccttttatttgtttagtatctgtctctttcaatggattataagtctatgacatctgagactgtgctttttccttcatcagagggtacctgccacaccaggagaccctggaagtatttgtaagccaggagcgatgacacatgtctgtaatcccttggaggatggggggggggggaatttgaggacagactagactacttagcaagaccctgtctcaaaacaaacaaaaaactagtatcactgagtagattggtgtataagtctgtccttgtttaatggagtctgatagatattatgctagggtgatggtctcaagctgggcatccctctgcagaaatctcagcatgatggatcccactcctacaaggaaaagcatatagctctgttgctgatgtctgagtctagcttgtgatgaatgcctatgatcacagaaaagtttgtctttgcccggatttccctcatctttgggtgaacataggcacgttctcccagatatacttttgcagagtcacatgagcagaaagtggtctaaggtgagccacaaccaagggcaaaatccattgtacataaaaataaacaccaaaaacacacagccttactcttgtttccgctcaggaaagacacaacctactggtgtgtttgtgatcagatacatacacacacatactcttccagatatatactttgtatatattcgtcaaaaccaatataaacacttaaatatcagtggaggagacacctgttcctttccttactagttcattccatagagtaatagcttgggttccgagttctcccctggcagtggaattcactacactgagtgctccatcacactctgccctgtacaaacacacacacacacacacacacacacacacacacacacacacacacccttctctatcaccctagttcctatcctcttgtgagacttccaagcttccacagagttactctggccagaggcatgtctcagctggaactaagatcagagcttagtctgtggacaaggtcaaggttcactaggtagatggggatgaggctcttgcaggtcaaaagtcattcaagggctgattttttaaaaaaatttttatttttattttatttttgatgttctgtctttctgttcacaaatctacctatccctatttgtatcatctcaagcagcggcaggtaggaccaagactcagggtccgcaacatgagcctctgcagcgaatggaaggtggggggggggcaggtgggggccgagcctgggcagatagctgtgaggtacgtttccatctctgcgggtcgggcaggcgaagccatttccaatctgctctctatcattttcaatatcattaatcccagacactctattttccatgcctgcgcagccaggcccccgagtgtgcgccgtgtaaagtgacacatattcatcaccggctcgtggcgccggcgccgacgctgatacaatattagtgttgcccccccccgcatggggcccgctccgcccggctccccgatggcacgaatccatcacctggagcccgtgtcactttccccagcagccacacttgtttgggcacttaggaggtaattgtggcacattagccagggtggggaagggtagggcgctgggactctgcaaaacggaagagaaggagacatcttcacatacgaccccaagccatcctgtcctggcccagcacctggctttggctaggctcctagaaacctgagttcttgctcagttctgcgtggaaagcatagaaatggacccagtgtttggggaggtaatgtctgggcctatcaggaagtcttagaggccaaggcttagaggtgattgatggcttcaaagtcttttatagccaacttgatcctgtcccagcactgaaacaggaatggcagcctcaatgcctctggctctgtgtggagcaggtgagtgaacccagctctgagggaaactctggctctggcctcagaggctggttccaagagtggaggctcttcctctaagagagattacagggttcagtcctcaggaaccctcagtgtgttatgtgcagtggatatcaccctgcctcatttttgttttgttttgttttgttttttcgagacagggtttctctgtgtagccctggctgtcctggaactcactttgtagaccaggctggccttgaactcagaaatccacctgcctctgcctcccaagtgctgggattaaaggcgtgtgccaccaccgcccggctcaccctgcctcattactagaagtgggtcagttcaggggtcttctgggaagactgcctggaggtggtgagctgcatgtaaggtagcctctgggtacagggagtctgagcacaggagagaagggaagagcagtagccagggccattgatctgagcagaggccagaccacgaaagggcatgggctctttttccctagtccgcagggataacacccattaacctcgtcagtagacaaattgcccgtcttgtcaaattcccatttaaaatgcaaactcgatttgacagggtaaactgaggggaggtgggatcggatggataatccagtggaggctcattatcagggcccaatgagaggggccttctggattgcctaacgaacctgccgtgatgaacctcgcagcctgttaatagcccatcccccactcgatactctgactagcctgccccacggcccacccctgcctgcccaaagtctgggggttcccagctgtccaccactacctctgagatggctgagatggtccatctgaaggctctgcaattgtagccgagaatctctctctctctctctctctctctctctctctctctctctctctctctctccctctctctctgtaacaaaccagcccttcccatgtctcactgggatcctgtacatggattacactactacacttggactatagttgtcttgtcagttagaattattaactcatttccaactgagaaaccagaggctcaggaggccatcttcccggaagcagagtgtcgcctctgggacatccatcagattccacgcgtcaggcttgccactgctgtcctctactctgctttgattgtgaatggatgtcctttcctcggcctccttcgtttcagtgctgtcactttctatgtgaggtcagggaaggtgacatctttttaagcctcatttgtcccatctggttttttctttcttttttatttttctttcttttcttcttctccctttttttttttttttttaagaagtgatcaacagctgagactttgagtaaagtttatggcttagtgagccgctccggtgctatttgcagatggtttaacctagggtgggcttgggaagagagcgaaggctgctttctgaggaagcagctactgaataggcccctcctgatttccaggaccaaggactccctgggctcatatgtcctcttgccttctacattccatgctcaggctactacaagaagaagctcatggtcactctccaggcctggggtggagctgacaggttgtccatcccagaggagcatcctggggaatgccagagggaggtactgccgactctgcaccgtttcctgccctctactataattggtcttttgtcaacgattcctaaatcatataatagatgagaaggagatgcagaagggcaactatgggtagctaatggtctgtggtttcaccttatctcccagggcatcatagctctgctcccagacaggtgcatatagagcctccagccaggctacatttgtccctgtggcaacacggggaattacttatgctgcctgaacaagcctggagctggcactcagtgaccttgggcagtgtcctctctgggtcttattggggcaccacttctcagttttagctcagtctctgacagtccttcccaggcaccaagccatggctctgtgctttccttttatgatttcttacttcccccaggggaggattcgaatctctcagctcgcattcaaggcccatctcaatttggcctcagtttatcttccatctttctcatgacaattttctgaactcccctgtctcatgcaccagccttgagttaccctcatatcttcatttggtactgtctctatattcagtagcccagaagagtacttcctttgacccactctgtccttccacacctagttttatcagtggtctggaaaggaccctagaccctttcttggtgggtatattgtgtgttggggggactaaaggggaaaagcagagagataaatggaatgcccagagtccctccagttgtcagcccagccatcctctgaggctggcctaattcccttcagagcccagctcccatcttcagggtggtgctttgggagctgagagcccaacgctaatgcctaagaaaagtcgtggatggattagaaagctagggggattagggccagagctggtggctgatgcaggagctgagccccctcctcctgaggaagaggaggctaatcctgcttagcgactgaggagaaggagctgcagagctgggggagccttcttcatccactgaagctgccagccccagcaggcaaagaagaagaagaagaagaaagatcaccaaccctgtctgcccatcaccctttgttaccctgaaaacttttcaacctcctgtatccacccccactgccttgtccagctacatccccaactattttaagtgtttttgaaattgtgtcacacacacacacacacacacacacacacacacacacacacacacacacacacactgtcaggtcatgcctgtaatgagggtgtcagttcccctggagctggagccacaggcagttgtgagcctctggtcaagtgagtttgaaatcaaagcataagagtagtaagtgtttttaaccactgggctttttctctacctccatcctctaacttttgtagctacctatttcttcatgcactgagctatctgctatgtcccattcgtctatccatgctgctcactgtgtctgttataggtggccttgggagctgttaggtttattcattcctgcaactcctgggactgtttgctgctgaccacatttgagttcctcctctggatttgccctcagctgctcccccaagaccatactctcctcaggtaagtctatagatcatgaggtgatgcaagaataggattacatggccccccaccttcaatctggagcaatgctgaaatgccacattagattgggctgtggagttgactgagtccctagaaccattgtatcatactggacctcttcctcaatactgctgcttctgccagtacttccctagagccttctctgtaaatttcctacacacacacacacacacacacacacacacacacaccctctcaagaaaatctcacccttcactttattcttcaaatcctacattggagaggatggacacagattaggctgcccgtgagaagcctggtttcagaagcccccagcctagatgctaggagggtaggtgtggatcaacagcccttcgatgggcactaatcctctggactcctttcagtataccccactgagtggagagagccacctgtactaaagctagggctaaggctctgttatagagacccagactgagatcctggcccgaagaagccctgggggaactgattgaagaccacgaagggctatccccatctgagggtttgatatggggtgaaaggagctcgtcctgggagtctggtctgaatggaaaagggaactgtggtttacgaatcagggctgagtaggagaaatgatactacacagggttggtctctggaccagaagaggacaggggcaaggaactgggtggattgacctctgagaggcagtttgggatgtgggggttagtggagggggacactcatactctgctccttacctttgatggacaaatgctaatgacattaccagcaattgaccagaaacaaataaataattcagtctggcctgaaaatgggagaaaagtacttaaatgctattgacaagtcagtccctggcctcattacccatgcagactcaggcctccacatcgaccatgcccccagattccttccaaccccaccgtgggcagcctcaggctccctcccacctcctggcttaggttggtcttgagaagagagtgacccaaggcaaccaggtggagagctaggctcaaggtagttacctaaattccttcccctctcttaactcacagctgtctctgttagttggaatgttatctctggttccagccctgcccaggtacacactcaggagtgggcgggggcgggggcggggacagggacagggacagatatatgttcatatgtacacatgcagaaggggacccacagctgatgtatctatcctctttcaggacacaggaagagtagtgaccccctggggcggctgtcagtcactgtgctgtcaggggaatacaaactcattaaatgtttccttgcctgtcacaggggtcctcagtccccaagtcaggcccgaggaggaggaagaggaaaaacaacgtgcagctgatcctctaaatgcacacccagaatgtctggctctggacgactgaggatctgaaggctgtgggctcctggacagctggcattttgggcattacagcacatagctgctcctcctgaagctgcaactctgcaaaaaagatgtcattttcttcaggacattgtgtttctgccccacttgtcctctaggccatctctcttggcatcatctgacctctttaaggaaactggggaagccacttttcttgtggcctcatccctcctggagcatattataccagagccccagtgcttcttgtaaagtggacagtcagaagccagcaacatctactggtcggattgggaccttcaggggcttccccacccagtgtctgggtctcaggcaaggattcaatccaggagaatctggaatggaggtctgggacctgagcctgggaggtggacaatgtttctcatgtacaacctggggcaggaaatggttctaaaagacagctatcctcttgtgtgccatataaccctctgtgtgtatgtttggggggggggagagtagagattaggtaaccctcagtacccacctatctctggtaccatgcttagctctctactaagtgagacctgataagactactcctggtggagaccagaacacccaccgtcagtatgcaggattttggtgtgtgctagggtgtggctccagcccatgcctccctcctgccctcctctctgacactagaggaatctcacctccaccgggacatggccccagtgcttccttaagctagccatttcttaccacttgtgctgccccacagagctccaggggcatctcagagcccccagcctggcttctggactggggtgagaaaaatcctccctgctgctcgccattcataacgctccctctgctcatgtttcttccaccaatgtgtccaatgtgtcccacggggagtcatttatccggatcgactggctctcctccgtgcaaacattcgtagagcattaacaagcctaaaacccaattagccttcaattactcaagccttagccagattttctgtggtagggacaaggctaaggaatgtatctggcactgcttgggtaaaagccttccactcctttgagccaatctgctcatcttaactgccagccctgtcctagccagactgcagccccctagtccccctccggcccaatgcaagcactctgcctcaaacctctcattactctttaaaaatccatttcataaatatacatagccaaaactgatttgagaagactcaagaaaacaatgcaaaataatgcagaatgaaaaactgaccaccatgcacttcctgttccctaaatcctacttcgagtaacttaggggttcttatttcctccccatgtttgaacctattatgcacatacccatatagttttcttccttccttccttccttccttccttctttccttccttcctgccctttcctccctccctccccccctctctttctttctttttacattttattnnnnnnnnnnnnnnnnnnnnacacacacacacacacacacacacacacacacacacacacacacacgctgtggcccgagtgtgtaggccagaggacaactttcgggaattggttctctctttccatcatgcaggttccaggagttgaactcagttcgccagtcttagtagcaattgactttacttgctgaaccgtctctctgctcccattttaaacattttatttgagtggcttcttccttcccctcctcctcttgttccttttcttcttcttcttcttcttcttcttcttcttcttcttcttcttcttcttcttcttcttcttcttcttcttcttcttcttcttcttcttcttcttcttcttcttctttttcttcttcttcttcttcttcttctccccctcctcctccttctcctcctcctccttcttctgttttgaaacaagtcctccctgaatggctttggagggcttggaactcactacatagacccagctggcctcagactcacagagatccacctgcctgtgcccaccaagtactgggattaaaagtatgcaccaccatacccagtttaacattttaatgttaaggccatactattaatattgcttaatgacttcataactataatgttgctattgttgtgaatcatgatgtaagtgtgcccgtagtgtagtctctgtccaacactgttttgaattatttctttcattccttacatgccttccttcccttccaccccccacccccatccctgaaatacatcactctactttcacatcctcttcagctactctccgtcctagccttcttcttcccatccacctcctcctccatcttctcattcttccctctctacaacccttccccctcctccctgggtactgtagccttgggggaggggcacagccaaagcagctattagctttgcaccccctaataccctgagtctcactgcctcttaacacctccccacctccccagcctgggcctctaagccccatctccctctagtcttcctctaatcactaaggcttatttctgattttctgaagtgacaaggagctgggtttgggggaggagggctgtcagcaagcatcttctaggattgagggagagaaggatgccgagagggaggtctggtctgcagcagcagagaccagctagctgaacaggtggctcaatgttcacatcccttttgtttatcttactgtgtgcctttagcagtggttctcagccttcctaatgctgcaaccctttaatttggttcttcatgttgtggtggttttcattgctacttcataactataatgttgctattgttgtgaatcatgatgtaagtgtgcccgttttccaaaggtcttaggaaaccccctgtgagaaagggagggaccccctgtggggtcgcgacccacgggttgagaactcatgttttagcgtgttctttcaagctagattctactttctctgccttcctctgtaaaaaggaaagtgactcacccacttcattcactttctgtgtccagagcctgtctacaccaccctctcatcctgtcctcactggcaccctgcccaggaagatggcccaacctccctgcccctttgattctaggagtaggaaaggcttctggtcttcccaccctatagaaatctcagttttcctccactgtctcaaatgcattcctccccaaatgcagaggactggtggagatttaaggacagcagcaaatctctttcagttttagagatacctaagatttaaaatccgtgcttagagtagaggtctggagagaggagggctgaggaggtggtacaccggagcccctgatgcagtcctgtttgagtgaccttggatgctcccttaggctctctctgaacctcgggttttctcctcagctctctggaagttttaagaggcccagcaggagtacctggctcttgcctggaagtgttcaccctgtgctaatttaattacacggcctgactgggcccaggctggggaagaggtttaatggcagctccggagacagtgagtaatcaagaattaattaagcgtttctggggatagcaagtctgagtgaggtagggattcctgggagcctggctgaggctccatggaggttacagctttccctttggtccacttctgcctgcgtaggaatggttgagagccggccatagttccaggaaggctctgcgtttagggccacccactaggcagtctctggccagcaggaagcagaacactggcataagatggtggggttgtgtgaagttgggcaggaatcattggctctggtcattgctatagggttcagattgtgtagattttgaggctgatttacatcgagaaatggaaagatcaagcagccgcaagtttcagtctcagtttaactatatacaatacaaataaggtgtttttagaccagagtctttccatccaccttgattcaggttagtcccttagattctctcagcattagcttctcccagccatcacgattctgctaacacactttttaaggagccctcttcctccacccaggccatggagaatttacttttcttctcatttgtttcacgtttcttacgtgaacccctgcctccaccaaatcaagttccacggagactgaaacagctggctcacagcggtgtcttcagaacttgaagtaggagtagggtagatggtctctttgcttgtctggaaaatggggagaatatgggtttgaaggtgtcatgcatgtaactgaaggagccgggaaggctcctggtcaaacttgcccgcaccactatggccacaagacttgctcactgccgaccactagcgtcttagcctcaacctcggggcgcagcgactgcgccaagcccggagccccgagccccgcccgccgcgggccaggctccttcccaggcgcccccgcgccgccggcgctttgaagtcccaatccggcaaatagagtcaatcaattatgaagggaacaatctggcggcccctcggggagcggcggccgagcgatcccgggggattaggccgcaaatcgcgctgagcctccctaagtgacagcgagagaatcgcgcgcggcggcggcggcggtggcgggagcgggagggagcgcggccgctaacccgattatgcagatccgcagggggcgcggattaggcctcgggggcggctcgccctaagcggctagaggatttaggaaaagtttactcgggcggagggggcggagacgagccggccgactgggtgagctcagacccgcggggctggggagaagcaagccccaccgcagccgcgttcttccgggcacacccgggcacacgcgcaaccctcgggcgggcagtctccacgcgcacacaaacccgcagacgcgcgctctggctcagccgccagcccagctgccaaaacactcgtgagcacacacccagcgttgacatctcacacagccaagcccacccaccgtggctcacactcaccctgtgctggcttatggtctggtgaaaactcacaatcacagatacgattcagatgttgagcctccaaggaaaagccagcagagacccacagtgacacacttggtcctacacctgccttgtgtttcccatagatctttcctggaggaccatgtggaaaagggacagagaacccagctccaagtgagctgaaaccaggcatttccaaaagctgtaaagctgtcagtgtggcttatacgcatgctgacactcagtgtatatccacatatgtctatggtagcaatgtttttggatagtgttgtttgtgggcagtggtatgtgtatcttatagctccacagctccacaatcgtcacaatcacaaacaaagtctgtggacgcacactgaccatacagagacacccatcttagacacttcatgcacacaccaaactcctgagaaagtcagcatggacagacagcggacacaagcgctgccagtgcggcagtgtggcacagaagacactcccttccacccctcaggcagcagtgagtgccttttggctgacttggattgatatagagagaggggtcggggtcaatgagtctttagcaagcagagttctggttccagtttcccacagtgtgtacatcatagccacctttgttgttatgggaagtgtgtgtgtctgtgtgtgtgtgtgtgtgatccctagcatctgatctggctggccattgggtgtggtcagtagggataaatgatgcacgctggctgtcagggtgaaattattttgagtatctctggttaccatggtgatagtggtgggacttttctttcccagtgtaaccataggctgtttgtttgtttgttttttgcctcaagctttctggatcagcgttcctgggaggccaagctggaacattcagactgtagagagggaaaatgacatagattacttttctcccagcctcttcacccaccagacaggactagccaggaagttctgcccacaagtccacaaatcaatcaaacttcctggctccactaagcattgtggcacatacctttaatcccagcacttgggagacagaggcaggcagatctcggagttcaaggccagcctggtctacagagtgagttccaggacagtcagggttacacagagaaactgtcttgaaaacaaaacaagggggctggagagatggctcgaggttaagagcactgactgttcttccagatggtcctgagttcaattcccagcaactacttggcggctcacaaccatctgtaataggatataatgccctcttctggcacacaggtgtacatgaagctagagcactcatatgtataataaataaatcttaaaaaggaaaaaaagaaagccaggcgtggtggtgcatacctttaatcccagcactcaggaggcagaggcaggcggatttctgagttcgaggccagcctagtctcatgagttccgggacagccagggatatacagagaaaccctgtcttaaaaaaaaaaaaaaaaaaaaaaaaaaaaaaaaaggaaaaaacaaagcaaacaagatttgatgccacatccaggaaggattcctctgggcactatgggcactaataagcctggaaagatagcttcagagagtgcttggttataatcagtgaccaggccatggggaaaagcccactcaaatggatgccttgcctcagaggctttcacgggggggggggggatccttctagcttgtgttgggggaggaaagagagtaggacaaggccctgttttatatacccagtgtctgtggaaccttggcaacatcttcatagttcctgtctgagctgtacacctcctcctctgagccttgcctggtctgaatcctgtcacactatctaatgaatatgtcctctcttagccacggctcacctctggctacatgtttaaacttgggataatacaataccttcctcctgagatcagtagagaggagccacacagtgtgtgagagagggttgcatagtaggtagttaatctgtggatctttcatttatttatttttgatctgattttttgagacagagtttctctatggagttctggaactctctatgccagtggttcttaacctgtgggtggcaaccccttggcgttggtatatcagatatcctgcatatccgatatttacattatgattcagattcataacagtagcaaaattacagttatgaggtagcaacaaaatgattttatggtgggtggggtcaccacaacatgaggcactatattaaagggtcacagacttaggaagattgagaaccataggccatgctggccttgaatgtcacagagattctctttgctctgtctcccgagtgctgggatgaagggcatgcatcctcatgcccaatgtgaggctttctattattgttattattatttgtagctcagagtatgcatgctgcagaaggaaagaatcctataaccagtcagatcttaataaaggttgctacaatgtactcttgcccattcaggcttctcacagaaggaatggacattcagactgactgtccctgccctgtctctggcatcgtgcaggcaggtgggtgggcaggagaggctggatccaaagtggctcagttggttcccagcggaagccattaccttcctggagagagaaacccactgtccatctgaggctgggggcaagggtaaggagtacagattggagtgggatccaggtctgcccccaggcctccttcccttacaccttctcctgtgcccaggtgaagaagctaagactctgtccagctccagtttgggtgaatgttccctcttggatctaggggtggggcaggtgatacagcaaagatagagagggattcctgctcacagcaccaactaattgattgcgcctactgtgtgttgggccccaagcttcctctgtttactctgtaccctagacacagctggaagccagcagggaccttttcaaaaaagccatccagttatctagcctggggcttaacttggcaatggaaatgagaggagtgtcacatgaagagggggaagggaggaggatggggagggggcaggcttgagacttgcatgatggctttgtagagcaagcttgctattgtatgaagattgccagcttatttggggcaagaggattgctggtgattgagatgaaggctacagacttactcttccccttcccccccaaaaaactatgctttgatactacgtctgcatttaaaatcaggcaaagcccttgactgccagatatcaggcatagaacctgcctgaactccagacgctttcctttctttcctttcattaaggcgtggtctcactaagtaactctggctggcctggaactcactatgtagtgcaggctggccttgaacaggcaaatgccaccacaacacatctgcccctcccacccgtgtatgtgtgtgtgtgtgtgtgtgtttcttcttcctcctcctcctcctcctcctctttcttcttcttgttcttcttcttcctcttcttcttcttcttcttcctcttctccttcctcctcctcttctcttcttccttctccccctccccacctcctcttatctttcttctcctttcactttttgagatagagtcttactctgtaacccaagatgatctagaactcactatgtagctcaggctaacctccagttcatggcattccttctatgtacccttctgagtgctgggatcacagacatgagccactacatgcagtgttctctctctctctctctctctctctctctctctctctctgtgtgtgtgtgtgtgtgtgtgtgtgtgtgttctttttatgtaactcagatctctactgcctttcatctttctctattcctgagtggtgtaggtggatcataagaagctctgaagccaggtgtatggtgcacgtctttaatcccagcactgggaggcagaggcagacggtgaatctgaggccatcgtagtctacatagtgagttccaggccaggcagggttacatagggagaccctgtctcaataataataataataataataataataataataataataataataagtgagctgaatgaagcacaaaagccaacagagggcctctacacacccaggactcagaaaaggccagcttcccctttctgttcagttcctgagcactctgtctgtacccaacacagagcctggctctggaaatgatgaacaggctctacagatcataatgagacctgaatgtggggcttgactctgaaaataagaacagccttagtaacatctcggactctgaaaatggtaacacactctgcaaattatcagcatctgacagactcaagaatcagcaacgagctgtgctctgtggatggccattggctctgcaaacacttacaagctttgcatatgatttcaggctctgcaaacaatgtcaggctctgtaagcagtgatgggccttcgaaataagaacaggctgtgaacagtgatgggctttgtaaaccgggatggaaagttgtgatgagctctaaaaagacatggtcttacctgttgaggaagagaagaacccatgggatccctacgagaaaagctgtgacttagtgtgttggccagtaaggtcctcctctcttcctttccaggtcctactataggccctctgtccatttaccgactggagttggggatctgggtggagtgggaaaagaaagcatggtgctgtgttgccactcccaaggcttggagaagacgaaacttccaagtagtcaaataggagcttgtgtctgtgatgacaaatttgttctcagcccagctatttgcaaggtggaaagtgtctttctacaccagaagctctcagaatgctaaaagggtgtttaaccccattctagggcctctaggggagccacagggtcagctttacaaagcacatctttcttacaggctccaacccaccttaaattctggctggcacctaaatatcttggtagcaatttaaattcctgtctattcttcctaggtctgatcagtgttagtggggaatacgtccatctcgcagagcacaggatctggggggatgggtagaagcaagcctctggtcttggtgggctgtgagtagcagtgctgaggagctagtacaggaggctgggaggaaggtgatgatgatcagccatggaggtggaggtagccagtggggaggagggtatgctagtgtgattgtggagaaattagggaagcaagtggtggcaacagtcaaaagatggccatgcttgccatgtctaaggtggcaagagatagcttggtgtatttggcaagagtacaccctgggcccaacttctgggaatggcatttgctagctgtgtgacactaggtgatttatttcagctttccgtgccttagtttcttcatctacaatataaagataagaatagtgcctgttccacagagttaccgtgaggattaagtcagttaacccctgtaaatccttaaaatagttcttggcctactgtgtgacagcactgggaggaagaagcaggcagatctctgagtttaagaccagcctggtttgtataatgagttccagatcagctagggctatctcagttgtcctcttcttataaaaagaaaatatttaattgctaggtctggttcacattggaataattcaagctacttagaaggctgagacagaggttaacaagttcaaggcctgcctggggcttggatatatagtaaattaaaacttaatatggttggtaccctaatgagaatttgtttcaaaacaaaacggggtggggagcatggctcaggggacaaattgcttgcagaacaagtgtgaggacttgagtttagatgcccagtattcacgtaaagtaaaaccagacaggcccggtagctgggcaaataagcccagtgctagaaggcagacacaggagtcttctggggtctagtcagttggtgagttccacgttcagtgagagatcctcaaagcgtacacaggagagtgataaaagaagatattagatgtctttctatggctttcataagagcatattacataaaagacagatgtacgtagaagtatacaacacacacacacacacatgcacacatgcacacatgcacaaatgcacaaatgcacaagcactagctatgttgcaaggtctgaatttaatcccaattactacaaaaaaaaaaaaaagaaagaaagaaagaaagaaagagaaaaagaaaaaagaaaaaaaacaaacaacagcacagaaaagaaagcttgggcaccatgtgccctgcagtgctctaagcagctcacaggtggtgacttgtttaattactaagccccttacagtagctaataccatatccatgctaaaggtgatgatgctacaggctcagaagataatacagctaggaaccataggaactctcagggctaagatcttcatcagacatcagatggtgatgatagtgatgatagaactggctggctgggtagagcaatggtgagcactgtgtacaagcagaaacagggttgggttgcagggatcagggatgcccatgagggtggcttgggtggcggtcggtggcattaaaggaggaggtgaaggtgatggtggtatgcaaggcataagaacaacattcactgtcacctataatcccagcacctgggaggctgagccaggagtattttgagtttgaggccaggttgggttgcctagtgaaactctggggaaagaaaaaaaagaaaggaaaggaaaggaaagaaaggaaaggaaaggaaaggaaaggaaaggaaaggaaaggaaaggaaaggaaaggaaaggaaaaggaaaggaaaagaaaagaaaagaaaagaaatgaaaaaaaaaaaaaaagaaaaaaacccaaaaccctgaaaaacacgtagtggctgagctcagctttttggttggaggatcacactcttccaggttttttaggcctctgggaggactgattttcagtaagactgaagtcaaggagggagcaaaaatatcttgttctattgatcaactaggatctttgggtcccgggtagtgaaaagacagagggaggcagacagtgctgcaggggcagctggagcttgccttgcccggtttcttcctgcttctcctggcctttgtcactctctaagcccagtatgtctgctcctaagagtggtccccactaacggtgcagacaatgccataggtaagccacccatcccattatggaactctgctggccttgtctgcccagcgcaggcctgcctgcttctttctggctgctgcactgagcagcagtcttaatagagaatccgcctctgcgctgcggctccccgcccgcccgcccatccctattatcggcaccatcaacggcggcaaatgacactctcggaatcttgactccaatctgatgcctggtccccggggccgaggagaggcgcaggccagctaggctggggggccggggagggggtgtgcagtaataggatgtggccgaggatagtctattagcattgctggaaatgttgatgagccccctttctggccccttggcgtcccatcctcgctcagccagacactgaggaggccttggtgggggtggggggaatagtttgtggggctggggctggggtccagaatatcaagctcccttggggaccatggaccttagaggaaggtcaagaaaatagtttatttagccttttagccttctgaccactgatctgggaggaagagggagtggggtcctttctagcagggagcacgtgatttttccatttccaaaacaatgggtcctggggcttcaggtctggaaggagccccaaggagcagtcctcccacccactctcccttttccggcctcttgaaagtaagctgttcagttcctccctgggatgcttgctaagtgtttcctctttgggagttctgattggcttttctcagtatcagcatcctgagatgcctagaggtcacctacccacaagacagcttccctgggtttggagaggaagttaggtctcaagcctgttttcctgggctacctcagttcctcatggctgcagatctgttggcctgtgtgtaatgtgtttatggaagggtagtaaaaggctgagcccaaccacaaggtacagaagaggcaggggagatagtgggtagaaccccggatgcatgaatgcagaatagtcggattctaacccagtccagttgctttgagaccctaggagagctacacactgtcatcctaagtgcttctccttgccctgccctctcttcaactgtcctttttaggatgatgagctaggagaggtggcacacacccatatcccagtacctgggttagaaccaccaggagttcaaggtcattatcagctacatagtgagttcaaggccagcccaggctccatgagcccttgtcaaacaaacaaacaaacaagcaaacaaacaaacaaaactggaccccaaatttgaagagaaaacgaagcccctcaggagactgaggagttctaatagctcattgctttgggaagccatgcatttggggctcgatgatatacaatagagtcaagttaacacctctcttctgtccatgaaaacagcttgaaggggatgggagaaaatgaagcaaaatgtagaatgtggtactgggcctggctctatgggacaggcaaatgggtgagagggtagaaggcctatcctgtctggctctgtcctatcctgaagggtgtctgacaagttggaagccagagcacctaggccagcaagactgaacttcttaaagcccagctttgccagaagaagaagaggttgggactagctgatccaggaaggggaagaaagagccatagccagctctcccctcccccaagcctgggcttctaagcatcacgccgaactcaatctgttctgcccactgcttccaccatgccccagagtccagaggccacagtcggtcaagctgtttgcctctgctgagtggctgccctcggtgcccccagcaggggcctggccatcagtcacagggctggcagtcctcagggctggacatagagccttatgggcagggatagatgtagactgtgggtagaaggcagcagggggcacggtctcctgggcccccttggtggcctctgttccctttgcagcccccctgcccctgcttctttcttcctctcttcacttgtgcccgcccatcttgcctttccccacctcccagcacctgccagcctcacctgtctggttcagcacgctcttctctctgtgtcccttcttccttctttcattagactctcttctctttgcttccaattccacagtctatgggtcacattgacccaggtttagtgtttgcttgtcttgagacatggtttatttatgtagtcctggctgtcctggagcttgatatgtagaccagaatgccctttgaactcacagagatccacctgcctctggatcccaagtgctgggattaaagctgtacgccaccttgccttgtcgtccactcttgcttttagtttgtgaggcctctattcagcctgaccatctctgtctcccagctaactatagaggattatgacccggtgatataagggttttttttgatccagcctaggacttccagggcagaggaagaagccttgcactctggaggatgcagagaaaacttggctgggcacgtcgggaagaatgcatttctgaaaatctgacagcagggggcgctgaatccctggtacttctcgtttgtctctagtctcaggagctgtatctacccaaggagtgtgctgtaaggaaacctagagtgtcctcaccaggggtgggcttgtcctggtctgatgctgccttaggttgttaggttttaaaagaaaccttcacacgctccctaagtcttttgttcatttgttttgattcaagggtttatgtggcccacattagccttgaactcctgatcctcctgcttccatctcttctgaattctggattatagacatgttctactatgccataccatgcaatttatttacctgtatcctgcaaacactaataacccaggggctttggattctccaagcaagtggtactggttccctggagagtatcatttacacttacctcagtcctaagggaggttagccatttggggagaggtaggtagtagagacctccaccacaaccccctgagaatcagtccttcctgctctctacaggcagtgttgtgggcctaaagaattctcatatccatgtcagcttaaggaggaagcaagtcttaaggcaaaccatatccaaaatgatccttacagatttcttgccaggtgcacagaggagaaggacaggcctgggaggggagggacttatctctgtgacagtttgacagtgggtgtattcataaattgtatgtgtattatgtgcccgggggtgggggtagggatgggagagaaagcacctaaatttggggtgagttcaaagtgactaggtgacatggattccaagaaggggaagcaggctctaggcctgtagtgccactgtcttgatcctcagatcatgaagggtcaccttcacagttctcaggaaggaagacaggaacctccaaagcttttaagtatggcattattattactgttctgtgatggggtagcaggcaggcccagcaaaggcctctggaaacagaaggtggcaggggagacttcctgaaggggttagattgataaagaaggggcttccgatagctctgtgatctggggcaggcaagaaagatggccagcctcagtcatttcaggacataccaacacctttctaggcctcccaggatgctgggaactggagttgagtcccccacccttcaccctaagctgaccatgggaggttagtaaatattgtaatcagattagtgagtagaggaggcagagatgatggtgagaaaatactctgggctgggttagcccctagttctctcctgggaatccaaccttctgaacttgcccaacccttctcctgtggccctaaggccaccctggctccttagcaccctctgttgacctgagtaacttcctggcacctggacttctctgagctctgtggagatttctatatcctgggtttcccagcctagggagctctggtgaccctagttcctcggggtgtcccctccccttcttctggccactgtgttgcttacccatgagattccaggatggtcctgtgcagcggagtgcttgctggagggaaactgcggctcctcggcatgagctgatcgctttcctcttctgccttctccgtggctgagctgggatcaggatagaggcacagggaagggaagcttgagtggatggatgggtgaggcagacccatccagtgaaacactgggccaccaggtcctcccgggagaggaagaaccaggaaaatagggattagtgttctatgaagctggatgtggggggaacttggtgatggaacccagaaggattgaggcagagttggggctgggaattaggagaggtagaggtggggtacctgagggcttgggaatctgggggtgggagtgagaaaagggaggctgaaggatgggagacaagagggtttgagttgaggctgtggaggaaagagctattgggaggtgtaggatttagagcatcaggaaacttaggggctggacgttaagaactgggatgttaggaggtggatatagcatcttaacaagaagaggttgaaatgttttggggatgagggactaaagtagcagagcaactgaactggaagaaaagcagtaaagacacagattgctttgggcagagggctgtccagggagcatgagagtgcagggcagtcccaggccaggcccccttcaggcccttgtgtctgctgaggccattgggggcaggcagtggtctctccttgttgggctgtcagagcgggttaggcttgggggaattggttctctggatcatctcctgggagccagcccctcctggcagctttgtttggcaaaagcgcaaggattagcagggctgcccccacaccacgtctcagcccctcagccccgtcagttcctggtgctttcatccccaaaggttgctaaagctgcagtgctttgagattagacccccacaaaggggcccctcatgcttcagccaagccttgggggcaggaagaggggggggtcccaagatctcagtggaaggccaaaccctggagacaaatcctcccccttcctggaacatccagagggtcctcaagccaaagggaaaaggccatccctgtttgacttcaactgagcctcttggaggagcatcgcagggagagcattaggcctccacctgtccacctgtagtcacctccagggccagctgggagctgaggtagggcagagagtgctagggagcagagcagaggctggagcagatttagaacatggatggagcctgttcactgcgcagtcagggagactggcctggcaagcggggcctgtcctgggtctgacagagctgaggcaggaatgcggagggtctcactgttcactaggtgtctgaggccaaggtcaacaggagccctggacaaaacgaagtgggtctgtgcagaagagtggatttcatgggacaatcaaagggtgggttgcagaaaagcctaacagttattattattgcccatgtaaaggcaaaagggaaaactaccaactgccttaagtaccattccataaaggaaaaggctatcttaacatacgtaataggaaagatataatcccagaatagagatgcttcagttaatgtaccttcataaaaatttcctacaaattttcttatagtttattggtatttgggtgacatgtcttgggacttccagagacagtgacttttaagaaggtgtctgtttcaaggggttgagccccctaggtttgtgcacttaccgaacctctgcccacccctctctgtagcagtaagtgggtggcgcagctgtttgaggtgtggcgctgggaattcaggggaggctgctgctagttgggggctctgctcagatggtgacactcctagccttggctttcccattgccaaggagacttaagaggagggggagggagtgggcctgactgtgggtcgatagagggaaatttcttcctgtctccttgctcataaaatgtttgtggtgaacatattgcagaacattcccagagaggccacaaaaggcagtgctggactggcagggtcaaatggagcacgtggagcctggtctatctaatcacagcacagctgggtcacctgccagggctagtgataagaaggggctcagggtagttgaggtggtggtggtggttatatgagatcagcaggagacacatcagaggtgcctaataaatcccttgcgagaaagtgaccctatgagcagaatgcccatgaggggtaaaggctgatagaaatctaatgtatatgattacactatagctgtcttcagacacaccagaagaggccatcagatcccattacagatggttgtgagccaccatgtggttgctggggattgaactcaggacctctcattttataaataagaaaacataagcacagaggttaagcaacttgcctgtggtcatacagctagtaagagcagaccccagatttgcacccaggtgggctggctctggtgtcccagctctatttactatggatgccttaccaagagcctacacacaggtttcttgagttgccactgttccctgaccatgtctgaccactacagggcagctccattgttttctaggaagcatcaagaggtacttaccatcttgtaggcactagacagaacagaggtgtagtctgatctcaaagtggtagctttagaaaaatcgtgttcatgaaaccttttctgttcttatctagtagttgaaattttgtgaatttcatatgcattcagtgagcacactgtatttacataatttccactcatctctctctcacctccaactcttcccatctcccatcctggtcccttctattcttctgtttttattacacacacacacacacacacacacacctctacttagtccatcccatgctggctggcatatgtacatgtgtttgtttaagacagagcacttggaattggataattttaccaggggatttgttcctggagattccccttcccttagcagccattgactatccgaatttaatcatctagggatgggtctcatagactttctcccattccatatccataagttctgtaacataatttcctttgagaggtagagcttaatttctttctcccatgtatgggatagacttaattatttgcttataaggaatagaaagggatggaatgtcactataacattttcaaaattacactgtatgtattcaaaattacatggtgtgtatgtgtgtgtgtacacttgtgtggcatggtatgtatatgtgtgtacacttgtgtggcatggtgtgtatgtgtgtgtgtgcacacttgtgtggcatggtgtgtatgtgtgtgtgtgtacacttatgtggcatggtgtgtgtacacttgtgtggcatggtgtgtgtgtgtatacacttgtgtggcatggtgtgtatgtgtgtgtgtacacttgtgtggcatggtgtgtatatgtgtgtgtgtgtacacttgtgtggcatggtgtatgtgtgtgtaagtcagaggacaacttaacaggaactggttcgctccttctaccacatcatttagttaccacatggggtccagggaccaagctcaggaggtcaagcttagctacaagcaccacctttgcactgaaccttccctttgcactgaaccttctcgcagtttttaaaaaatatttatttatttattatatgtaagtacactgtagctgtcttcagatactccagaagagggcattacagatggttgtgagccaccatgtggttgctgggatttgaactcaggaccttcggaggagcagtcagtgctcttaaccactgagccatctctatagccccttgagagcaatttattaaagattcacattctttttttttaaagatttgtttattattacacataaatacactgtagctgtcttcagacaccccagaagagggcgtcagatctcattacaggtggttgtgagccaccgtgtggttgctgggatttgaactcaggaccttcggaagagtagtcagtcctcttaaccactgagccatctcgccagccccaaagattcacattcttttgatctctctatctctacctctttttgttttttgttttttgttttgtttgtttgtttgtttttgttttttgagacagggtttctctgtatagccctggctgtcctgaaactcactttgtagatcaggctggcctcgaactcagaaatccactgagttctctatctgtctctatctctttatctcatccttctccatctctacctctttctatctctgcctctatctctttctgtctctgtctctgtctctatctctttctgtccctgtccctgtcccaaccctatccctatccctatccctatccctatccctatccctatccctatccctatccctatccctatccctatccctatccgtatctctatctcatcctgctagatagaccccttggaagacaactgagtatttggcagtcagcaccagccaatagccatagctctacaaatgagccttcctggaagaggactctcctaccccagtggagattaggacaatagagccctggctgacagcctaactcacaagaccttgtgccagaaccaccaggtgactctccgaaactgagtcagtaaatgtttgttgtaggtttctctgcaattttggttttgttttcttgaggctaaatgttattatatagcttagattgacctggagcttgagaagagtctcctgcctcagcagcccctaactgctgaattacaagtttgtgtcaccatgattagccatagctgtcctggggtaaggcactgaggagagaagacttctgtgagaggtttgagtaggacccaggcaccaaggatcctatttcgagccctttctgtcatggactgtcttcttttcctgcctgttaatgcccacagcttcatttgagggacccctcagcatctttcagcctcccttcccttttgagtccccacccagaaggtcacatgtatctgtgtctcatggtgtgtgtgtgtgtgtgtgtggcaggagagatatatgtgcagtgtgtattagtggccttcatgtagcatgggttgatttgtgagttttaaatgtaaaggaacatgggttcagctgtattcctgtattattttggatagaacatggatgtctgcaggatagctgtgtcagagggcccagggtgggaacctgtgcactttatctatgtgtcggtatttgctaattctgggatgtgtgtctgggttttcatgggcaaacgttctcagagcttgctctgtggtcctccaagggttaagggaaacaggcgccaccataactcttaatcatagctttgcaagcttagccagtgcccctgttgaaaaatgtttcaaaaagcaaaataaatgatcttttagttacagaagtattgattttgcccacatctagtaataaagagcaagtcacctgtagctaaaactcttgtaaaatatattttatactctaatagtctgcagatagagtcacccgctgagcacagatgacaaatctccccagtgcggcctgcgccccccatatttcacgtcagggacacagtagtggcgcagcagcagcaacagagctgggcctccctgcgggtgaggacatggcctggttggctggaagaaaagaaaaaaggcaggttcttagcacatacagccccctgcccctacccgggccttctgtatccgctctggttatgatggaggcttatagcagacagatcatcctcttagatctagaggtcacaaaaagagctcctctagtttcttcatacaaggggatgtttctccataccactcagtctcagaagctgatagtttgggaagctacattcatgagaatggatggtgtgtgtgtgtgtgtgtgtgtgtgtgcattaaaagtgtgtgttaaagaatattatcctaggtttgctcagtcatgttcatacatacatgtatctggtttgatcttttccaagcctctgtgtatgcataaagggatgtagttggtccgcagtgcacacatgtgcagggtaaccctgcatacggtcagagggagacacttgatactttctgttggacatgtaccatcttggttctgtgtagtcatgcagacacagtggactcattcagtcccttcacacagatccaccattcacctacagaatcaggctgctttcaaggtttcctgaattccttggagaaatagtcttcagtctgaaatgaccaaatagttacttcagtagatgtgaggctcagtcaaacatgaacctgccatccgtctgtctctcccagccctccttacaagtgaagggaagttgctcaagtgggaaagctggcctctttgtcttctttgcttcccagaggggatgctcccagaaatgaagcctaaacctggaaggccacatgcttttgcctcattctgatgtgtgtaccagggcagatctcagcatttctgtgagcctctgttctcataaagtccaccggtttctcctggcaccatagtctcttagagaaggccatttgctatcttcccaatgagggcatcctcacagaagccaggactctccctaccttctacctctctgacttctgcctgaacggctcagaagtgtctgctccatagtccccacttggcattagatggatgcgattagctgccactccaccattcccacaggaggtattctggggcaaagtgggcagaggaaacttggtactcaaaagtagtacagggtacccttgcatggaaatatataggggtttcgaactcttgttgatggaggttgaaggagtaaagacagacacatttagggagactgatgggtttaagaagttccagaggaagggagggaattctgatcatacgggagatcaggttgggaggcagggatgggcaggagtttcagggagatttggagagctctggaggtgggtgaggtagagcagggagcagtttaaccacgaaggaagaccactggcaactgtgtgtgtgtgtgtgtgtgtgtgtgtgtgtgtgttgagggggttatttgggatggaaaagcctggaggacacaggagaatctttagcaccaggggcagtggcttgtcgaagggaggggacagagcaggtagctgccccgcgctgggattgggaagtgggggtgaaggggtagggaggcctgtttaagcggcggccgcgctaataacctgtccaggagatggctcgtggcaaattgctttgttagtcttgtcagcgcggccagggccgccgtcagcgcgcgccatggatcaagatgatgaatcgccgtggatggcgcagatgcgggcggcccgcggccgggcccgggggttggggtgggctgtggaggggggccgcagggggcccggccaccgccattaactcccgaattagctctaagccgcccaccacatagccactgccctggggagcgcggggccgtaggggcgggagcgagcccgagatacagagaggctgctcgcgctcgcttgcacaccctgaacctggaccccagcctccagaattctgactcctctggatgctcctggattcctttgaatgcaccccccccccagtgggatagaacctccagtcagccgtgcgagtctgcctccgttgtagccctgtgttaggctttttagggtaacctttgctaactagctacatcccacgaactactcccaactactccaaacccccgatgtagtgagcagatgggatgggaggaggtctgagctgcagttctctttcagtgtgtgtgtgtgtgtgtgtgtgtgtgtgtgtgtgtgtgtgtgtgtgtgtgtgtgttcggatggcctgtggggggagcgggtttttgaggttgtcgttgctactctacatccaggagcccagagatcgcagataagagtttagggggacttgggcccctcaatttacttcaacaaagacacctagtatccctggagtccttggaaacctgtagggactcacttctcccagttcctgaatggtctcattccttgaccaccccttcttggtttaatttagaaacatcccccatacatacatgtacacttaagcagaacctacatgttcacatatgtatatatcgaaacacactttgtgtataaatgggtatatattcataatatacaacaggttaaagaattgagcaaacacataagcaatgcaacacctactgtctcctccccacccgacccctgaagccaggtcactttgttggggggtgggtcctagtttttcccggcattcctttctcttaagctctttgaaggtgtctcagccacagcctggggcaggtgggtgggtgggtgaggaggctaagaggagcagacttgggaggaaggtcctgagccatttttattcctcagtttctgtctagacagtgacatttttgaagtgcctttgttaacccagcaggaccccccacattgtggcttgccaagtttctcactactccaggtctccctaaaaggcgcagcccccttccccagccttactctctttccctgagtttctatctgagcagttgagctcatctggaattttgtatctcctcttcccaatccacaataaactcaggagccaggacctgggctacaatgtctgtggaaaccagggtggagggtgggaatgtgatggagtgacagcagctccctctgtccttggtctccccttgtatgaaagccctttgaaggtaagtctagcctggcactgtgggcttctccaggtgtctggaattttgagttgcatgaggcttagcttgtttaatgagaatgatactggctacttagccactgtagtggctattcctgtgttgtcaacttgactctatctggaatgaactacagcccagaattggaaggttcaccagtgatcttaatctggagactgggagatacaagtttctgacctggatcttggcatggagatcttggggcatagtggctatgaattccagaagattaagaccgggagatctctaaattcaaggtcacctgggattaaaggcgtggtggcacacacatttaatctgggttacaccttctgctggaggcctgcataaggacactggaagaaggaagattgactctcttttcatccactgattgccttgtgggactgagcaactgctagatccttggacttcccttcacagctgctgctgaccattgttgggagttggactgcagactgtaagtcaccaacaaattcctttactatatagagactacccataagtcctgtgactctagagaaccctgactaacacagacctgggatgactgaacggatggaggtcttggcagcctggggtaagaagaataggaaggggaattggagtttgtggcaaacagatccttccagaagcaggtgcctggttgggtcctatgctcatcacttgcagcctgcagcacggaatctgtggtatcctcaaccactttgtcctcctcagcacagagccattacccttcagcttgcccagtggtcccctgttctgtccaaggaggggagctagggcagggtgagtatagctgggtcactgaataaagacagaagacacttgcctcactagaacaaggtttctcattggatgggggaggggaagtactatttctggcctaatcaagtagtatgcacttgtgcccagagttgtgtgacagaataagtatatatgtgtgtgcaaagctctatggttttctccaggatgatctatgtgcgtgtgtgtgtgtgtgtgtgtgtgtgtgtgtgtgtgtgtgtgtgtgaagggcaggtgggtggaggtacagtggcaatcttgattacctaagccaaagaggcaggccttcactcccctccctctccttctctcctctccccttctgcactagtccgagatccctgaagagaaattaaaaggttatttaaagcccccgcctccgctttttttgtccctttaaatcgagcctaaacggttttgctttggcagaagaaatcttttctggagcattgaggtggggggtgggggatcctggtgggagagaagggtctaagcagcctaatcctcttatgccccccctccctttctttggagcctcctccccctcccctcaggcgccctgcctctaactctgggttgaagatcggtccaacctctaaatctgctggtggctccctctgttccaccaaggccaacatttctggccctctcaactcagcctgggatttaaaaatctactgttaagtacggcaacctccgccatgccttaacccccaagaaaataaacagcccacttcctcagagctaggccagagagtttgcttgtagacctgagcaatgtcagaactaggatccagctgcctgtctgtccagacacctggattacacttgacccgaaaaaatcacacaaggcttctttaccaacacacaaagaaaatcccacagttacacatggactgtggttacatgagcaccagtaacaaagacacaacacattctagtcccagccactgaggccaaagacaccttgcacagagtactgaccacacaagcatagaacacacacccttctctccaggtaccactgtcgtatagacacagccttccaggcttccacagagtcatggccacagtagccaatcttgcactacaaggttcccacattaacggggacacctgaccccttggcacacacctcagacacacaaggccttctctggttccacagcctcctgcataacgacctcttcctatgaatcagttgcacctggaaggagaaggaggctgacaagaacctcaaaccctatccagggatttttccgctttgtgaatcattgctctctctctctctctctctctctctctctctctctctttctctttctctctccctctcccgcggagacagagacaggtgcatgtgtgttgtatgtgcacgaagaagtgagttcggcagactcagcctcccaactctctccaagagcatcctgctgtcggaagttccaccctgtatgggttgagcttgggtggtgagtactgagtgcaggttgtgttcgtgcgggtgttgtggtaccagaagtgtttgtgtgtgtgtgtgtgtgtgtgtgtgtgtgtgtgcgcgcgcgcgcttgcgcttgcggttgcttaagcatgcagttgcccagttcaaccttgttgtgacagctggggagggagacaaagccctccttaagccatcgcagagcaccccaaggtcaagggagaccaggtagacctaggtgaaggtttctcagtactcctcaactccgtagggattgacctgcggctttaccgcccaagatccagagccagcaatgacggaacgatattctcggggaaatgatggacgctgccggggtccctagttcctctaaaggtttgacccgggctgcctaggccttgagctgcgtagatgttccagaggggctgggcggggccggggcgagagtggcgtgtgattggcagccacaggggccagtagggagcgcgcggccccgcgccttgcgcccgggaaacgcggtttaaaactccagctccagcccggacgcgcgtagatggcagcggcagcggcggcgcgggccaaggagaccaggtgcgagcgggcggggctggcggggtgcagccaggagcggcctgggacccggcgggactgggagggctcgggcggtcagctccggggaccttctcctcgtttgcggtcctgtagtctgggagtcggtgggcggatcggaaagtttgaagagggtgagagacttggaaggcgacagacacttaagccttaggggagacgagatccgaggcaggaggagggagctccatggggagaaagagggagcggagcgatccccagggtcggacacgaagccagggcgacagaaggaaagaactagaaattccgaggcagaaaggagggcaagtcgtgggtagaaaagcgctgaggcggagacggaagcctcggccggcgagacgcaggcacccgcagagaacgcttcggatccgtcacggttttgcctcatttggaagatattacttcgcccctgaaaaaaaataaatacaaaaaaggtttggatattaagcggagacaaatcctttttcagtttggaagggggcggcgggtggggggtgggtagtcagggtaatgcagagcagatgcgccccgaggcgtcacgcagcccgcggcccaggctggagagggggcgcggtcctccgcccaggttccttgcccgggatcccgcagggccacctacacctcccagcgtccctattcccgagtaccccgcaatactgggatttagctcagaattcatcctttctggctacctagggctccttgtctcctgggattgcgactttacacgaattatttggccggggtggtttggcgcttagcctgcctctgccctcgtagacacgacctcaggttaggatctttcaggtgggtttttggtccgcaacggccttagttctctggaattcgtttggcctcccacggcctgttttggcgtggagctggcgtggagcgggcgaactccagcagggaattcaggctggggcggcgtttgggaggcagggatcaaaaaatgaagggctctgccagggtctctcctctctgggcctctcattccggtggccataacccatcttggacggcgacaagctagggcctctaatggacctttctggatcttggctgaagtttcttaagttcccagaccctgatcaggggcctccaaggcccgggcggtgcctttagagcacttagggggaaaacatcttcttcctcaaattcctatcaatctggggaccaaatcctggtagggggctgagggctctcggtggtgcagttgtgtagtgacttgtcggagaaaccaaggctaggctctgggagaattgtatctagaggccgggcctttcgcctttccctttttgggaacattccaaagctgggaatccgcggggcctctagtgtagcctcagcgagggttctgcctggggcggtagaaggactttttcgttttagaaaaaagcggacggacgggaggccaggggtcttctggactagtactggttttctgtaggcaacttgggtttggggacgtcgcagagagctgagggctttacttactggataggccttggggcaaacaggctgttttcgcaccactgaggttgcaggcgtagttgtggaaattgtagaatctcccggtctgtcctcgcgaaggtgggagtgggagacgtgtcattttcttcttttgtgccgtgccagggatcctgtgcgtcgcaggcgggttggctctctctatagggcgctggccaaggaaattctgtggcctatccgttttaagtgggttgcagtgagctctgttttcagttttctttccttttctttttctttttatttattttttgaatccgcgcttcattttcttgcatatctaggttttagaagggggaaggcactctcccctaaagataagtttctattacccttcttccctaaccagctgtgcttatgtatgtgggtgggtggtcaggggggaaaaagtaaaatttgctgcctagtgagagcaaattatccagataatttgctccaatttctctcctctacgttggagtctttggataagaagcaaagcaccgcaactcaggacgggatggtcaccttacctcatcccgtcaggcctcaggggcacagactcctgcaaggacgcaggaacttggttgcacagtcgaaagtggaactgaagggcaaaggttcgaagaattggaaacccgtcccaggcgaaggccaaatgaaagtgagctttaggatggctctgttggctcaggggtcagtttcctgggctacgggtgagtgcttgtgggaccccttgataatcctctctgttattttcaagttactatgattccacatggtagcaaaattcactgcttaaaataggtaactggagttaggcttgtggtctgaacacacagagactgagctgggaggggggtttccaccgaacctctggctggcatgctagatctgaaatgagtactgggccctggctttggctgaggatattttggtgcctgggatgttggggagcgacagatccacagatccggaaggattgctggggctcctagcagactttgaaagcaagaggaaaactagatccagttgctgcagcaatcccactccccaaataacgtagtgctcccccccccacttccctgtattagaaaggggttagtctacattgactgccacaccgagtggaactcctggcttatagtgacctggcacactgaagtcacacaggcagaaagatctagacacaaattctcagtatcccctggtagacacagtcacacactcccaggttaagccttcaccgacactcgcagataacccgtggggcgactgggcacagagagacagcccggacttgggacctcaccttgacagcccaagggcatcggagcctaactttttgtccgccctccatttctgtctttctccggagcctggcagaggcaccctacccttctacccagccatagtcctggaggaggcactctccgccttgcccgagttcccattccacaccccctcctccctggctcagtcccttccccacgtcccgctcggccgccccgcggtgcccatgtaaatgacagcaataaatatctaatcaaggccgcgggcgacgccacggccattaggagcgggcaggctggcgaagtgggaggggtgatgaggagctttgggttgtgttgtgttctggcctccaaattcctcctgctttgagtacccctcatccctgaccttgagcgagtctccgtttcacctcctgtcaaagggtacttactgtgctgggttctcctcccgctgccctccccccctcggtttgattatccgtctggttttccaacacttcatttggttgagctggggtcctcctgcctggttgtcaatatgagtcggcagaaccctcattccagctttagcccagtttctgtaagcaaaaggaagagcggccctagctgcccggtcagcacacttggctttttcctgtcgcggtcactcccgcctctgtttaacggctctaagcgcgccgcaaccatatgcccttaggtcaccggagctcactcgatctccaacccccatctaagcgccatcgccccagctgtcagggtttggctgccgactggtccatcccaacaggaatctgcgtgcagtgcgggaatcgcgtgctgggtactagcaccacagacccttgcggcgaatccccaccagatgtcttgagttaccttctccaagagggtattctacagtcaggagaaccttctccacagagagactctacagtgactgctctgggtcttgggtctgcatgatgccagagcggcccggcccacgcctgcggtactccccggtctgggcaaacccgtcgagcccagcagtcttttctgcccaggaacagcgggatatctgacccggtcctcggttccaacacagtcgtgccatgcccctggtctcccgctctctttgcctctttgagagaggacacaggaagcacagagtcaagcagttatctctagacctggagttactcgcagagactgaggtcaagtctgccaacccgccctcaagagcggaagcttgaccataattgagaacaccaaaacgtcagtaaatctctctctctctctctctctctctctctctctctctctctctctctctctctctcattttccctcccacagtcgcatttcgctgtttcttttcttttttaaatttcagccgtccgacttcttagcaccctaaacattaaggacctcagaaaatcgaggactgtaggcaaaagggcctctcacagtctcggcccattagcctgtggggggctaattaccccaattagcggctgatttataattaatggctcggaccgaggaataattggatgttaatggataacagtgtgtgtagggaactttaagagactgagcttctctgggggcagcaggctaggtcatcctgagacacatccccatccttctcctgcctccaccccctgagcggagagggctggtcagggtttcctttgagcaattttctggtgcagcgtgcctgaacctctcctgccctgaccctgctaaagccatacctcaatcccacatgtgtgcttttttggctccaactccaggatcacgttggaggctgctccacagtgaggatggctgggatcccgctacctcaacagcaacggccagaaggtggcttgatgtttatctggtggggactgtggattttccctgctggggtgggacaaggaggagccaggccaccagttcacttctctgagctccaagttcttctcctgcctgtctcagctgtttcctctcacacgagcatccacgcagctataacgcctatataacctgaaccttcacactgcaactcaccacacggaaatgcactgtaggccaaacagtggctccacgtttatttgtggaatcgatgccagatactccctgtgttgcattctgggaaccaagtaccagctggggaattcagaccttgagatagagggaactcatattggccagacttagaactctgatgaatattgagttcacattgtggagtcaaatttcttggattccacattgcttaagctgcttagctatgtggctttgggcaggcaggtgatctcacctctctgtatcttggctttttttttttttttaatcagtaagtgggaattacaatgttgtagtgaggattcaaaaacatgtatgtaaacttctgagctactgagctcctccaggggttgataggccaggttgccttaagccctatctcccacccccgaacccccaactctctctacttgtagagagtattatataacttgtatcaacaggtatctacaagcatggttggtaaaacttgtgattatttggtagacacaggcaaatgggaaactatataatttgttgaagtaaagttgtgacagaaatgtaaagaggtcacccgactctacctagagcattggagaggcgtcctggagaaggaaggttactaaacctaatatgaagaaggaccatgagttctcaagtgatgctgatgaggagacaatattcccagaggagcaggaggcaatggcatagtggctttggggaacaatccctccttggctggcggtagggtaatggtgcagtgggctagtgaggagcagcggagaatttgaatatgcttttcaagaaaaatctggccttgactggttccagagatgactgagagatggacaatagaaataagatgaaatgtttactaaagggttagtggtgcaaaggcgatgacacggggagtgagggtctgagggaagtgactgtgccccagacctccaagctcttacacaaaagaagcaaatgacaccacacttctggccattacctcttacctctctctttaggttgtctccttggctactccctgtggtcttagccacactgattcatgagttgcccccatttcctagtgggaaacgtagtggggaagaatcatgtgcctggtaaggaaaagatggggctggtcccagggcttccaccacctttgagtacctgatttagattttaaaaattggggcgctgggaaggttcgcaatgacagatctggggatcactgagctcctacaaagcaaaaaacatctgaggagtaactggaatgtctcagtgccaaacctatacccagatgttgtgcctgagggtctttgggctgggtaggcaggggctccacatgcagcttatcatatgctcattgctggttcctccaaactgagaactaaggacatatgtgcgaatggggcagttactggggtcacactcagctgtttcagtttctaagcagtcagtgagctctttcttagcctcagttcttcatctgcaaagtagcaggaataaaaaaataccttcctagttgaacaggggaaagaaattaatgagattgccaaagccaagtgtctggcaggtgctgggcacaaaactgaaaatcttaggccaagccactctgaggtagaagatgggtcaggtatcttgtgtactaattccacaatgcacataaacttaggcactcacacagggcagaatctctcttcttttgcctccctcacaagatgtttggcctgtctaagtttaagcaccttcatggcaatcctccttagtctcccaagtgctatctatcattacagacatgggccaccatgcctggcttgctcacacagttttcatggtaaaggtttctctctctgttggagtagaccaaggagtcaatgtcttatcagaacaggtaacacagaccaaggtcacagagcacatccgagtctgagtccaagaccttgtgtgtgtgtgtgtgtgtgtgtgtgtgtgtgtgtgtgcaggaggggctctggcctcatgttctatattcatgtttctatattttcctaccttccagtgccaaagtcttttgggaattcaaactgctaagtaggaaggatagctgcagaggttaatcccctgagaggttctcctagagcttccagggttaaaagagcagcagtgtttctcaaggaaagaattccctggcaataggctccactcaggtagttactccatgtttgatgcccagggctagttctcactggtgcctacctgattcttggccttatgctagaattaatgctcaataactccccagagacttaggctcctgccctcctgctacctattgctagctgtgagatcttgggcaggggacctttatctccccaaatctcattttctcatcagtgtaaacagggacagtagtacctacagaacagtgctgccttgaagtctcttcagtgagaacacaatgcatagaccaggacttggctcagagtgaagcccagtaaaaggcaaccatcattggtactgaggcctcaggatgcctgggaactggcagaggagaagggaggcttacagagtgttggtttccacacttcttgttttctttctgtgaaacaaagttgttctgccttgttttctatcacgtgtggcaatgagaagaaagcgagggaaagctactggctacgatgaagaaaagaggtaaaggcggcctgtggggtggccggagcagggtgtgactgagggaaggctccactttccttttaatcaaagacgcttcgcatgtggtttcctgggagtgctgccgttaatttataaaaaatgccccctaataaaattctgcttgattcttcgattggctgggcattaggccgcagccagcagcgacgcggggacataacggatgcatttgcagatttggaaaattaaagccatctatatggcgcctgtggcgggagatccgccgatctgcttgcttaatgaaatataaagattcttttaaccaatgtaagcacaattcgacagcttgtgaaacgcggccgcaccatgatggatggctctcctggctcgccaggaattgcagggcggcaccttttaaatatataattgattctgtttggagtgtgcagtgggctgagcccatgcaaggcccagcctggggctcagcatgcaggctccagtttagagactccagcaggctctgcagagcttcacctaggtggttctcacaactggatgtgggcagattccatatgctgggcttggctgaagactctaggccggccaggctgtctgtgttcctggggaagagtccacatggcacaaacctctatccatctgtcatattcacacagacggagcaggtagcagggctgggattctgaaccgtcattccttcctatgcctcatagtgagctatggtggctttgcctcgatcattgtttcttgatctaaaattctcattgatttaatacttattatttgctaagccaagatgcctaccaggctctgtgctacatgttgcaggagaaaaaaaaaacaagggtaaaataaatctatgtattttatgttgaatgtcttcctcctagatttcttttttcccccctcctgatctgtctcacatcctgttcaaaattggaagagctgtgatacattggcccagcagtgggagatagggcccacattacttcctagaatgacatttaaagtacatccctctggttacattctcatactcgcgtgcgcgagcacacacacatacacacacaccccatttgtgtacagaggttcacagatatgtttagctgcagaggcatgtaaaagagacagatacataaaattcagacagatgcgcacacacttttttggtggatcccaatagtgctgtttctatgtgtggacatgcataggtactgacataagttatgagtatatgacaatgtggtaccacatgtatgcagcttgcgtgggaactagcatccctagaaaaggatccctctgaggcctgagaggaagctggagtcctcatgtccagctggaatgaggaaaggaatatgcgactggtggctggagagatggtgaagcgattaagggcgtctactgctcttgcagaggacctaggtttagttcccagcaccttacatagtggctcacagccatccataactcctgctccaggggatccaatcccctctctggtctccacaggcactgcatgagcttggtacacatatatacttgcaggtaaaacactcataaagaaataaactaactgattctttaaaaaataacaataagagaccacagagaaaggagttgagctaggaagacctgccttacacaaacctcatctcaaagggcacatgcacatacatgtacctacacacacacacacacacacacacacacacacacacacacacacacacatacacacacacacacatacacacacatacacacacacacatacacacatacacacatacacacacacatacacacacatacacacacacatacacacacacatacatacacacacacacacacacatttataagcatatatgctggtgtggaataaacattttttttactgtcctcctgttgcttaggatccaatcagagatgatagaaattgaggagttgcatatgctgaggtatgattctgcatgcctgggggttcatgggaaaactttacctgtggaaacatgccattactttctgggagcttggacctcagcaaattatacgatcattcttatctcccatttccatatatacaagatagggataatagcagtttctaccttgtatagcattggaaggattgatggtgatgtctgtatttcagagctacttaataaatagttgtcattaattcattcatcaaatcctaatctccccagccctgattttgtgtgagaccctggcaatctgggctgaaattggggtgtccagaaatgtgtgaggtgtagtctctgctacaaaggagctgtctaatgtgggaactggaagtgtctttatactctgacgtaggtgatagaattcagaaaagcagtgtatgctgggagtatggcttagtggtagagcgttgcttagcatgagcataatctaaggttacatccccagcagaggggacaatagagccatgcgaggtgcatagcataagtgtgtcatgtaaacggaagctgttgtagttaccattgtcatcctttttacctggagcctggagaaggaagaggcagtcttctcataggttgcaagaacagagccttcctgaggaggagtccttgagccaggactggaggaagtaagaacttatcggttaaaggggaggaaagtgtgtattttggggagatgcttatgggagaaagtgacaaggagggccaagtaccgggtgctggggaagaggcagagcaccaggctggatgcagaggtaaagggggggaagccagatgggcaagcttgggggaccagggaccactgcggtgaggcgtttatggggccgagttacgtacatcttgactcacttaatgtagatgctttgtgctggggtgggaatacacacctgtaatctcagcccttgagaagcagtggcaggtggatttctgagtttcaggccagcttggactacctagggagttccagactagccagaactacacagaaaaacctacccccccccccgacctccagggagaagactttttgtgcatcaaaaactgtgagatcagcaaccattaagtgaattaaagtgccactgcatacaacagtatgcttttaagcaataaagccccgaatttgttgggaagtgacattgcggtcacagggctgggaaatatgatggataaggtttttttcttcttcaagttgtgttccccttcctcatctggagcttgcaactccctttgaaacctagctccatctctgaatccattggaatgtatgaataaccctccacatactcacacccaaaccaatgataaaagaagattataaatacaataaatatataaatgtggaaatttcctgtaatcccgtctgctatctcttagagataacctctgtcaacatttcagggcagaaccttctagacttttccctatgcatatttattcatacattacaaaaatgagatcccatcaggcaccctgtttgttacctatttcttccatccagccatatattgcgagcatcagcacatatagacacatatcattgttttaagctgtgcgctgaatttcgttgcgggctgtgaccgtaccttcatttactgagctaatcctttctcgatggacagttagctttgcaattgtttgccatcataagcagtgatgtgataaatattcctgtacacatatctctgcatacttgagggataaatctgtagaaatgggattgttaaatgaaagatgatatactctctggaggcttttgatgcagagaataaagggcttattcatcagcaaggtagggggggaccatttaccacttccctgtgtagtaactctggatgataattgctctctgtatttgataatctaattggtgaagaataagtgactgcccccctccccgtggctatagctaaggattttgtcatatgtcagctggctgcttgtgcttctttatgagtttttccttcatttatttagcttgtttcttctcagggtgagcatccttttgcttctctactaaaactccatacattcaggctggagatacaacccggctggtagtgtgcttgcctagcatgcacaaggctgtgggttcaagtccgtctgtgctatgcaggtgaaggtaagaggagcagagtgaagggcagattgggttgcagagtgaatttgaggctagcctgtctcaaataaaatgaaacagtagtttagagatattctctttaattttcacatttgctatgtcatcagtgtgtctaatatttttctaagttacttgtctgtcttgagcgtcgtggcttatcctgttagacttaggtttggtctgtttatttgttttgttaagatggtttctctgaatagccctggctgccctggaactcgatctgtagaccacagagatcacagagattggtctgcctctggatagcatcatgcctttccttctcttccttagacttctgctcatgtttatgatgcatagagtgggctcctgtagctgctggaagacgtcagccaccagctgcagacttccatgcgcagctgccagtgcattcttactcgggcgttagattcacatttcacagttgccacggctcctccagatttgagttttatcctcttccttcttactttagtgtcttcctcagtgctcctgattctgaaaaagactccatttcacgcagatgctagggccccaaactacagttctctctgtcccctttgctctcctttcctcacatcttataactcacccaacagcaatgaagccatgctcctttcagactacatctagaagctggtctcttctctcctctcaccgccctcccacgaagagaggacaccatggataacacctgggactttgaagcaatgatctgactttcttcatccccaccgccccagtctgttctgcctgcagaaacacagtgaggtggaggggctttttgtttgtttttgagacagggttttactatttagccctggctggcctgatctggccagagatctgcctgtctctgccttccgaatattggtgttgaaggcatatgctactatgccttggcctatgaggaactttaaataaataaacaaatgaacaaacaaaaagcaacctcctgggacttgtgaggtagcttagtagagagaacaactcccacaaatagttctctgaactacacacacacacacacctatttacacgcataacataaataaataaaaatgtaataaactttattaagaaattatggagaatggagtaatggcaccataaagtacttgctgtacaaacatgaattccctgggacttaccagcaacccagtttagcataattggcaagctacaggccaataagagaccctgtctcaaaaagaaagtggacgtttcttgaagaatgatacctgatattgatttctggcttctacatacatgcgtacgtttgtgcatgtgtgcacatgcatttgtacacatatacacctaacctaaatcatatgcacaaatgtgtacacacacacacacacacacacacacacacacacacacacacattcacacacacacctagcccaaattatactgtattacttccctgtaaaagatcctctagggactttccctcactcagggataaaaatctaaactcctagccagggaggtggtgatgcatacctttaatctcagcacttagaaggcacaggtaggcagatctctgagttcaaggtcagcctgggctacaaagtgagttctagaacagccagggctacacagagaaacttatcttaaaaaacaaaaacaaaaacaaaaacaaaaaaaaaccaaccaaccatgtgagccaccatgcgggtgttgggaataagacatgggtcttctgcaagaacaagtgctctcaactgctgagctacctcgccagttccagaccctggtgttagtgttgactcatagacttggtgttgtttgcactttaggaactctgtccttactgatcctttggtctggaaggctgttccctgagcttcacacggcttaccttgcattagatcatagaagaatctctaaaataaccttccctctctttcttgtcattctctttccctgactcattcagaacatttgttcctacctgacacattgcatgtatgtttaatcacacacacacacacacacacacacggagggagggagggagggagggagggaagaaggaagggagccctacactggggaccaagactgaggcctagggcatcattatacgcacttatgctgagcaagtgccacaccaatgaactacatgcaccaccattttaagacaaagcttttcaggctgaagagatggctcagcggttaagagcactgactgctctttcagaggtcctgagttcaattcccagcaaccacatggtggctcacaaccatctgtcatgggatccaatgccctcttccggtgtgtctgaagacggctacagtgtgctcacatacataaaataaaaaaattctttaaaaaaagacaaagcttttccaagttgccaagcatgaccttgaatctgatcccaggcctgagtctctagatagctgagagaacagactgcgatgtcagacctagaatatttatatcattttaattttatccttacttccctgaaatgtaaactccatggagttaggggcattggtacttggtaggtgtgtgtttaataagtagttgttaaacaaatgtacagtgtgtggtatagtgcctgtgtataggtgtatctgctgtgtgggtagacctctatggaaatgtttgtgtgacattgaattgaattctgtgcatgtaagatagcttctgcgaagactttgccaacagtgtctgtatgggattgtctgtgcttgtatgcatgctgtggatgtttggttgtacacacacatgcacacacacacacacacaagcatgtgaccatccttttctgtaagaatggggagctgatacacctggtcatgtacccctaagaaaagaacctgcattacaactcagctttcccttccacctccaatatccagggaataaacacacctcctttgtgcctttgggtggctacaaacatggagtcactttccaaaagtgatgtcacttcaaagccactttcaagctgatgcaggctgagggttcagatgagacagcagggttcagaggtgacctagggctgacggggcctggacagcctcttgctcatacaagacatctcactgggagagacatgttccttgacacatctttcttgaagtaattgactacagaagaaagcaaccccagtgatgtgtcgcagggcaggtctccagttgaccattgccttaacagcattcttctttctctgcgtctgctgatggggtttgtggttcttggcttgcttgctttttggggatttgtgagaataaaggcggtaatggcagtgaatggcagcgagagtgatagttttatgtctgtgaagcagagtagggttttaaattactctctcatcagagcaaatgcctcagtggggaatccagctggggacttggctccagggaaatgcaatgcaatggtgttggttgaatgagtgagttgcctgtgtgagtaagccaatggctgtacacgtgagcgcctgggggattcaacgaagagggccaaataatgcagaaaacggattgggcagtctcaaagactaacttgtttgttttattttgggacaggatctcatgtagtccagactggcctcaaatttgctctgtatctgaggataacatggaactcctgatcttcctgtctccatgcccaagtgctgtgactaaccaaacgggctccaagcccagctaagacacctttgagcacatagtaccccaggccatattgaaaaggtttttcttagttctcagtaaccctggtcggtgcttagtcctactgttagtgaccttttctggagacagcaactgaatgagggtcagggaagttgggtgagttgtccaaagtcgcaaagctctgaaggccaaagctgtgattccagcccaagccatctgactgcaaagtgaaccactggatgaaggggtgaatggaagaataagtgcccactctgtgggcaagacaaggccaccttctggtctcgggtagaagcccttggtaaagtggacgtgaggtctgggtgggggctgatgtctctcccaggatagaattcaacagccacgcctcataatccttctctgtcttcccacctgcaggcggatgccgccatgcagcactatggggtgaatggctactccctgcacgctatgaactcactcagcgccatgtacaacctgcaccagcaggcagcccagcaggcccagcacgcccccgactaccggccatcagtgcatgcgcttacgttggctgagcgcctagctggtaagggccctggggacctggccgtggaagcaagatgctgggggaccaaaataaggaggttatgaaaggtaaaggggggagggctgtgtgagcagcttattttaggtacttagaaagcccttggtcacttagtaactgatgactatgctgtgctggctctggtcgcacatttacataacatctgtgcgagtatctgcagaatactgctcgcttgccagcactgtgctgggtcctggagctacctcagcttttggtttcctataacaaacctttaaaggaggtgctcattagccctgcctcatagataggctaaggcagcgggtacaggactggcccagggacctttctctgggaagtagatgggagaggactgggtgccttgggagaagactgaacatggggagatacagatgatggttctcatggtttgaataccggttaattgccaggccactgtgtggatctccatccaccccccttctctttttctctctacctgtattcaaaccccaagaagaaggtcactgcttcattttatagacaaagaaacttcagctcagagagaataagtactggagcgtctggggattggaacatgaccgtatgaggtcagacttgtactcagctatctatctgtacattcacctcttcccttgggacctagtggtagttctaggatagatggcaggaagtggtcagtgaatcatggcaatgcttgcagtcatcagtactcaatgcccaaagcaagtcccaggcacttaagagaggcctgaggctgaagctgacttcggttgtcctcctggtcacctctcagatgatgtcagtgccagcttttccgtgactgtgatgaaatatggggagggacaatttaagaagagacgagttttattttggatcatagatttacaagttttgggctgtgattggctggcattacttgctgtgagattgtattgagcatcatgtcagagagtgcaatgcatggtaaagctgttcaccttatggaaggcagaaagcagagaggagggaaggagtcacggacacccacagaggctcacttcctccaccttagccttaggtcctagcagccatttagccatgagtccatcaatggatcaaccccttgataaggttaacagtttcatgatcaaatcaccttttactagtgctaccagctggggacaaagcgagtcttcagtccggtctatatccagaaataacaatggatatgagcaggagttaatgacatagacagtaggctatagagttcctgggaagtgatgctgcccagttcacgatgtcccagtccaaacctgttcagttgcatagggcccatgtccatgcccggtagttgtaagggactgcatagaactccttggaagaccgagtgtccgtagatccataagaggacatgatgacctgagtcagcgtgggacagcttagggcagcatgatgggcaggaggcaggagacttttcaaagctccacaagggggaagaatcatcaggagactgggcacaggagtgggagagggtctgaggaccatgcctaccttgggataccagcctggcaggaagacatagcagccagccctacttctttagaccttgctgggcctctgaacaactgagtccctggttgcctttttggatcagtgtagacattagtgtccagtgtggtggtagtcagtgtagacctgccccagctatggctacttccctcgtttggagtgaattccttttgtccattgtgccagtgacatttagctcaaggactatatcgcagagaggattcgggacagaggctcatgcacactgataggaacagaggaattagggtgtttagcccacttccaaatggccaacttttaaggaggaaatgagcccttgtaggggttcttatagaaatcttgccttccatggcaggtgctgtatgaggaagcctggtctcctcttaaccaccccactccttgtagtccttggagctagcactactgctctgatgctgagatgctgtctctccactagaatgggtgtgactaagtggtccccactctctttcctgctcaagggtaacacttgtgacttcaggtctgcctgggctaagattggaataagttataaagggtcattctttaaactggagaagtatctcaaagtctagggtttccagtacatttctcctttagggttttgtagaaagtttcccaaccctggagtacaagaggactctgtggtactgttcagaggcaaaaacaatttgagctccttctagcattgacacggtccattttttgtgtgtgataggaccttacagcccaggtaccaggcaagcagaagagaaaagagctacacactagcctgagagagataccatcttggctgtttttcatgttaccaaacacaagggcaagcctataggattgatggttcatcagctttggtactccagtccaaccttgcagtgtggggatttgttctcttcccctgaagaggcagagagagtcaaggctgggtgtgataagcctttcccatgtgctgtgggccctgccagggctaagctttctgcttagcaaacgagaccagaaatctcatgtctttctaccagagacgcatagacaagggaagaggatgggattgaatgtgagagacagagactaggtctctgcccagtcagccttcccctaagtcatccttaagacaagcctcagcgtctggtgctaggaagtcatagtgcccagaatggaggctgttgacaggttagaaaaatttccgatcccagccagtgagagaggatgggtaatttccaaggaccaggggtcagctctgacggctgtttgggtgtccaaagtgggtcagagcaaagtcaggttcaaagcttatttcccataattaaatgggccttctctgcttgccctccaacggctgtacatttcaagacatcatcttggaggcccgctatggctcccagcaccgtaaacaacgtcggagtcgcacggcgttcacggcccagcagcttgaggccctggagaaaaccttccaaaagactcattacccagatgtggtgatgcgcgagaggctggccatgtgtaccaatcttcctgaggcccgtgtacaggtagggtccggctctcccaactgtatcttgcagataggtgctagccatccagctggtgtccagttgtccaggagtcagtgtctactggggcagtgctgagatacatgtctacttctctcatgtttatttcaaaaaatagatggcgttgggttagggaggattatcacccagggtacaatttttcctctcctgactgctcctctccatggcccccaggtgtggtttaagaaccgcagggccaagttccgaaagaagcagcgcagcctgcagaaagagcagctccagaaacagaaggaggccgagggttcccacggagaaggcaaggtggaggccccagcctcagacacgcagctggaaacagaacagcctcctggtttgcccagtggtgatcctcctgctgaacttcaactgagcctgtcggagcagtcagccagcgagtctgccccagaagatcagctggaccgtgaagaggactcccgtgccgaggagcccaaagctgaaaagagccctggatctgagagcaaggtgccgggctgcaagaggggcagccctaaggcaggtgaggtttggcgggctggggattcagggcgcgcgggaaggggtgtgtgtgtgtgtgctgcaggcagagtgggaccacaggtcagagaaggccaaatccagcactctgagtatgtgacctggatcaaagcaggagagtcaaacactggctggcattcagaagcgtgactggctactgcagacctgtgacccatgtccaccctttagttactgagccatagaaaggtctaaatagagcttctagatgaggttccaggagagagcatgggaggcagggaggttgagaacggaacaggtgagggactgactaaatctctttcaccatttatgaattattacagttatttcaatatttagcaaccagtgcagatataccagtgtatgttgggcggataccacgctggtacctgatattcccgttacagcagatttcaccctgactcaacattctatcaggacttggcctatgctttctttctttcttttcttttcttttttttttcttttaaagatttatttattattatacataagtacactgtagctgtcttcagacaccagaagagggcatcagatctcattacgggtggttatgagccacccaccatgtggttgctgggatttgaactcaaggacctttggaagagcagtcagtgctcttacccgctgagtcatctcaccagccctggcctatgctttttcatcccagaggtctagtccattaggcgctcttgtggaaaggagatctgctgagagggtctagaggatacgtcttctttttttgctttgttttgttttgtttttgttttgagatagtgtttctctgtgtaacccaagctgtcctggaacttgatttgtagaccaggctggccttgacctcacagagatccatctgcccctgtcttccaaatgctgggattggaggcccgtgccaccactccctagcaggatggttttttgtttgtttttgttttgtttttttaaagagggtctcattatgtaattctagctgacctagaacttcctctgtagaccaggctggctttgaactcacagagtccaactgcctctgtgtccagaaggctgggattaaaggtgtgcgccaccactcttggcccaggatggttctttcgaggactaggcacatccatctctgctccccagagctgctctgggctggagcccctccccctagccagggtgagaagaaacagagcgctggcgagctgtatatccagacacaaaccctaagctaggcaaggaggacagaaggcctttgagctgagggctggggagagaagattagagtcctgcttactcctggacaagattaaggcattcctcagggaactggggcatgggtgcccaggtaggagaaaccctgcagcttctctaagtccctcccaacccaattctgagggtcacttcagaggatgccctggctgacatggggtggtgatggttctagccagactatgttcactgcttgattcaggggattggagcgagcctctcctccgagcctagttctcttgttctgagtacttgttttgtgtcctctgcttgcagattccccaggcagcctggccataacgcccgcagccccagggggcggcctccttggtccttcccactcctactcctcatccccactcagcctcttccgtctgcaggagcagttccgccagcatatggcggccaccaacaacctgatgcactactcgtcttttgaagtgggcggtcccgcacctgcggcggctgcagctgcggcggctgccgtgccctacctaggggtcaacatggccccattgagctccctacactgccagtcctattaccaatccctgtcagcagctgctgctgcccaccagggtgtgtgggggtccccattgctgccggcgccccccacaggcctggcacctgcctccgctgccctgaacagtaaaaccacgagcattgaaaaccttcgcctccgggccaagcagcacgccgcatccctgggactcgatacactccccaattgactgtctggcttctaacccaaccatggtcttgggtgtacccctgtctcggtcccatggttattctcagaaggctctccaagttctcctagaactaactttgagagcccagggatgctggggcctggagtcctttcaccttgtctcccttattcaaagtcccaatcccaagtgaaacccacacaccctctgcatggccctgcttggaccccatggaggtcaaatggggaggaggggagcaactggctacaccccctcttcagtattgcctcctccctcctgctccccccccccccgttagtaagttgaagtgtggaatgtgagatataaatataaatatataaaactatattttcaggcactgcctgccccaggccccctttccctgttctcacatcgccactacccttgcccctgagattcactccagcagattctctctctctctctctctctctctctctctctctctctctctctctctctctctcatcctcctttttctcctgatcccccctcccctgcagccccactgcctctgtcttgatccctgtccctctacctacccttggcctttggtgctggctttattattgtccagtattctcaaacagtgtttcttttgggggttgtagggttttttttgtttttgtttttgttgttgttttttgttttggttttagtcattttgtttcttcctgtttctcttctgctccgcttggctatctcctcccttaacctgaactctctctaggcaactcttccattccatgccccaagattcatcaaagtcctacttggagacccaggagcaacaggcaggaggtagctctaaccccacagcatctccagatattaggaggggctcacagtcaccttttcttctctttctttgcttggaagtacccgctccccagattgcagaggggcgtgcagccgcagtagaacagagacctcattgcagggttctagaatcccttctcagtgagtgaacccttatggctacatacggtctcaggacttggcttcctgttgcagaggccggtgtgggagtaggcgcttctgtctcgttagtcactggcatggcagggtgtgttcttctatgtctaggcaaccctgctctgtggacgccctttcaagcttgctaggactgtcttgtctggataagatgatttagaagattctgtccatttccaaccacccagtgttctatgccacaaccttgtatggcagaggctttaattaagtttaataataataactgcagcataagcacttagagaagcccagtttgtaagttagaacattactgttgttttgctgaggaacagtgagtcctgcatacctgaagatctctgtggatactgcctctgtttcccagtaaatgtaaatggctcctttttaggttagacaatctggatttgatcctatttttcttggattccagtgtgagggggggggctactccattcccctgcccatggtgaggggtgggcaagattacttgaatagattcatggttatgattccccaaccctttggcttgccacagaaccctcaaccccacgcccacacagtggtggcctggcatgactggcctacagagccaatagtgctcaccttagtaatgtcagtctggactggggtaggagaaggttttagccagtaaaaagtgagacaggaaagcatgaaagaaagaaacaggagaagtgagccacggaacacaaggtgactggcctcgtgagaggtgaggcagagagcctaggacgcagtctcacattcccactttcacgcagcagcaccaaagtcagttgagggtttcttaagaaggggtatcttcctgggttctagaatctgcgaacatcagaggaggagagacttggacggggaaatgagaggttagcaaatccttagggagatgagggggttctgggttagggagggatcagtgatcgatccatggttaccctattgtggtcagcttcaagaaattatgtttctgtattgtctcatctggaaccaggcgcagggctgaaactgtctttctattcctgggtgcaaatgactgattgtcactgggacttgggatctaacacttctgggtattaccatttccagaagccttcccaacctcctaaagagcaaggccacctgaggtcatatctggtcatgacatgagcctggtctatcccaggcttttctaaactctcttagatctttgtcatgtgttctctcatgtgctgacccaaatcccgaaggccagagaagggagggaagacacacgtgggttttatcttcatgaccatgtcttcttaggaggattagagggcacgattctttgaagaaattgtgggtgagcccaccttcctgacactgctgatggaatctctctcaggcctgctggtcacttagggcagagagcccaaggattaaacccttacaagcccttctaggaagagtcctgtatgtctctgctctgtttgaggtctcctttgccctgcttcctcatttccctagagcatggttcaggggcctgggtccccatttctatgcagaggctgactggctgtatagactgcttttcaaaccagctgttttgtgaccacttgtgcttagaggttgtacaaagccttggcaaaaaacaaaacaccgtgtattgtatttatttattctgttagttgacgaagcaaaactcaaacctctcactttccctcgtcctgtcccctgcgtagcacagcatgatgctctgtcctgtatatctgtcagtcttttggccttacttcctgtgactttgtgacctgttcgttgtcttaattggctaataaaagagaacctggcagcacagcccttgatccatcttcattcccagagatgcctaccatgggctaaatggtagatggtgtttcagagtctcgccatggctgacgggatacaatgctggcccacctgtagcagctggcttctctgctggtttttcgtcactctctatgactcttgtctgtagctggtgagtcacattggagaagtcactgggaacagctctgtcttttctgagctttttttgggggggggagggggggtgtttcacctaaggtgagagggcaacctgggccaggtgaccagggggatgatagttctgcaaggtggagagggaaggataatctatggagtgccaagcaggccagaatcaaagctgaatactaggaaggcacatttgaatctctaggcatggtgacacacacctgtaaccccagcacttgaaaggtggaggaggcaggagcattttgaaggccaaccacccaggctacgtgagacttgtctaagaaaacaaacaaacaaacaaaacgactttgttgattttggtgtgtgatgtttttatttatttgcaagaggtttttcttaataataaagtttattaaacaaagaaaaacaaaagtccagagctgctctctggtggaacaggggcctttgagtgcggtgagttctttgttatcagaggcaggcatgcaggacatggagaggggattgctgcagtggtaaggtcacgtgtgtatatgttgttggaagtccatgtgtaggaatggggacctgtgccgtgacctcaagggcctactgactggtatttgtgttcttccggatgagcaggaaagagtgaaagccaggagacagggtatgtaggtggtagccataggaaaagcatacagttcagaagtttgtggtgtgaaatctttgcttcccctacttatttcaaggaaaaaaaaaaaaaaaaaagaaagctgggcatgatggtgcatgtcttttaatctctggaggcagaggcaggtgtatctctgtgagttcgaggctagcctggtctacgtagtgagctccaggacagccaggactactgagagaccctgtttcaagtataacaacaaaagagtaccagacatctccattctttgtccctcatcacactgatcctatcttccttctttgagttccagcatgtctgcaaggggacccattgccaggaggagcttttggatggacctggggctgggacctccctctgtcaggccttcttggtaggagaaccccaacaggcctggagagtttgcagataggctatctactggattttccagggtgggtcctgacctcactacttcccaggtcattgtgaccccaggagctgcattcctctcccaagtggggctgaggattacccccccttacctccctgacagatcaaatgtcaccccaaatctcccacagatcttacccaggccctcagcaacccagtgcttcctacatatctcagctttgagggacacaccttccctggcacgaagcttgtctggtaacactgcagttcaaatccctcactcattctgtcagcattgactgatcacctgctgaatgcctagtcccatgctggatgctgggtatagagaagcaagcattaaaaacgtgccctgacaatcgcagcttggggtgactcagagtttgaaaaataaggaactggcaacagagaatgtccttagttgagcatggggaggtcggataggtgctttaggagaaggacatgacctgagccccatatgtcaggcgcttcttaggaattcaagagcaaagggtcctaggaaaggcacagtccatccaagttgcaggactggaaggggcagggtgggactgtaggacggtgcggcggggtcaacagatgaaggtgggaagggaaactaagaagctgggcatgctgctgtatacctgagatctcagcacatgggagaagggggaggccacctcagctacaaaacaacaacaaaagtctagaaagaacaacaaaaggaaactgagtttagagtcaagccctagggctagagcctgggattttggaaattgggtgagtgaagaggtctgtcttttatttaaataattgcatactcctcgtgctttgtacatagtgggtcataacaaggagctagatggagtgagagaggtggccattgctacatcctgacatacatacatacaatacatacaatacatacatacatacatacatgcatacatacatacattgagacagtagcatcaatctggtctacaagagctgaggagaagggctgattaatgaggagtggtttgggatgtaaaatcaccatggtaacagcaggataggaagaccctaggtgctcctaggtctttggctcagctacaaggtagatggataccctactctactggacctgggatgactctgagcttagtttggtcttgttggcatgtaggaggagcctttcctatatttaggggaagatggtagcgtggcctttgttgttggtatggacttgatccaacaggttcttcgtgctatgcatcctttaaacactccacttaatccggccgcaactctgtgggttaagtattattatcatcctcacctgatccatgaaaaaaccgagttacccaggacccagctaaccttgaaatttatactcttaacctcggtggttgccaacccagagatggccacgggagccatttgactgaatgaaatgatacagagaagtctgagaccaggacctccaggaaatgctggttgtgacagagccagagcaaaggcacctcaacttgctgtttactgtgggctcttctccagccctcagcttcctcctctgtggaatgggagctgccaatcatgtctagcctgcttcacaggagactcagatgaggtaaagagtaagaaggcatttgaggggacagaagctgagcagaagtatatccgcccccaccaaccagtattaaagaggaccgaatgggcaagataggtttcctcaaagtgtaatctggagtttcacttttgcttaaggcttggccttgaagtgttctttcagattaggagtccattcctcagctctggtggaaggaacgcctgctgacagggcctggagatggtcccttttagggctggggaacccttccccatctctttcccacagagctgcactgggctagagcccccaacccctaatctctcattctcctttgcttctgggaaagccgattaggagccggcctcctgcccgcccccctgacaagtttgtctgaacttccaacaaaggctcttagagggttgaagagggaaggctggggcacagggaacctgacaccgctggcctgggatcaccccagcagcctagcaggttgctctgtggctctgcccaccctgtggtgagcaggaatgtgcctccaaggggacattggcctcacaaaggcctgggggatgcagtggggggtgggggtgggggtggagcccttcacctgagaaccctttgggactcctaagcaagcagtcagggactgcatgcattcttatacacccattacacacatacatcctaagctcccgccccatatgctgacttccaaattgagccacactctctgaatctcacgttcatgtgtgcatacaccccctacaaatatcatacacaacctgcagtctgccatctagacgctcccacatagctgctccacccccagaaacacattcttccggatttactcccatccagacagcccactgaatgctcagaggtaggggtaaggcccctctctagacaggaatctcttgagagaagggccagcttgggccaacagctccttggtgatagttctgtacttgtgaagatgctgtcctgctgcctgcgtgaggtcctacaccagccctgtcattcatacacccacagctactcccacacacccatccaaggggctgccctttcacacacagcagcctcccctttcagggctaggttcttggaccccaaagaggactcaaaaagggccctgggctcagaggcctcgtgacattcagaagtgggcatcttggaattccttatttatttatttatctattcatatttgtttgtttatctattaagatctcttttgccaggcagtggtggcaaacgcctttaatcccagcacttgggaggcataggatttctgagttcgaagccagcctggtctacagagtgagttccaggacagctagggctacacagagaaaccctatctaacaaacaaacaaacaaacaatcttttatctatttgtatgtggatgagggtgcacacactatgacatgtgtgtgactatgacatacatgtagaagtccaatggcaacttttcaggagttgcttctcttctctcacctatttttttgaggcagggtctcttgtttctgtcactgtgctacatatgtgagcttctggctgatcctcctgtctctctcttccatcttgccagaggaatgctgggattacagacaggagccaccacatccaggaactgaactaaagtcttcaagcttgcattatttacccactgaggcatttgggttgcccccaaccccgcccatatcattttgtagtcagtcctagctggaatcactgtgtagtcttgaatttacagaattcttcctgcctctgcctcctaagcactgggatgacaggcatcaatcaatcaatcaatcaatcaattaatcaatcatcatcattatcatcaccatcatcattaccatcatcatcatcatcattttggttttttgagacagattatctctttgtagccctgactgtcctggaactcactttgtagagcaggctggtctcgaactcacagagatcctcctgattctgcctcccaaatgctgggattaaaggtgtatgccactaccacctatttaaaatcctttaaaaaatatttatttatttatttattcatttatttatttatctatttaatatatgtgagtacactgttactctcttcagacacaccatggttgtgaggcaccatgtggttgctaggaattgaattcaggacctctggaagagcagtcagtgctcttaaccactgagccatctctccagccccaaatctttatatattttttaaaacagggtccagcatccttattttataatggccccacagattatatggttgctccctcatcactgtctccctcagccgactcactatgttttagaagcccttggcttttctgttacccaaatgagttcattacccatatagctagggcttcccttcccacctccaccctttacctgaatatgatgagaagtgaacgactaagagcctaccatactcagagtctcatggggctcaaggttctcatctgtaaaatggggctaatgataatgccagctccaggattcttcatggtcattaaatgagatgacgtctgcaaaacgtctgcagaatgcatacgttggccattcagtaactgctcctgtttcttattgctattacattcttatcagtgctagtaagcaaaagtagactctgtcccacatctagtctcatggggaaagcagaaaatgccacactaatcaccctgtatgtagatgtaaaacagccgggtaaatgagaaggacacacacttctgaccctgcagggtctacagcacacaggaagcaatctgaagctaggatcagaggtgatctaggacaagtcacaactctaatagaggtcagaaccagagctcagtttgcagctgcagtgaacgtgagactggtaccaaggtcattttgtttctagtagattgtctgtggtccatttaagaagcttcgtggggagcagaagtgacggctcagcagttaagaggacctgagtttgattcccggcaccagcatggtggcttacaaccatctgtcgctcctggtccaggggatgcaaaccctcttctggtttctgcaggcaccagacacacatgtgttacacaaatatacatgcaggaaaaacaaccacccataaaataaaatagaaatccatcaaaaaagaagctgccaggtttctgtgaatttgtttcattgcctataaaatggggagttccccactgacccccctggtttgtgagaaaccggggagctgagcatggaaatgaaggattaagctgcctgccatcactaatgagtctaagcctcactctgggcttcctccaccccccccccttccaggccagggaacgtgtgcagccctctaccctgcctccagcctgctggaaaagctgccacctcagcccgggatcccttccaagacaagtctggaacaacaaaggccacaggagccgttcttcctcctgggggctgaccgcccagtggctcctttatcttggcaagcaagctgaggaactgttcatggaaagagctcgtgtgaggcgtgtgggtgggtgcatgtgatctttagtgtgtgtgcacaaagctgctattgttgctgtccctacctgaatgggctgatagacctggaagtttgggtccttctcaggcaccctgatcatccctggtcttcctcacattatgtgctgggcagccaggagggaaaggaggcaaactttcttacctaagaatactggaagcaatccacagtgcttcagaaaaaaatccaggttagtagaggtgcatgatgacagtagggagagatgaaggagggattctatccttttagaaggggcagggcacgcctcaaccctggaccacttccccatacacacccaacagggccttcaaggactaagtggcttgcctcttttacctttaccttcagccctcctttgatgagccatctagaggaagactgtgcagccgaagcctctagcctggctctagtagtggctgctattggcaaaggcttcatgtctgttgtaagtctggcttggacttgaacagctttgtaaccctgactttagtcccttggactgggttggctggaaactggagatatgcaggcgggacttggcttggcctggcccttatcttactttccctcacatcagccaccagaagatggacagatggggctgggttgcctgctggagggtcaggtctgttggtagtttgggaaatcctaaatcagatacccagaacagacattttcagggctctcttcagtcctaatccagggcaagagcctggtactccacgcctaaccacaagccgacagggatggggatcactgatgcgttttgtaatgcagtgacatgacgtggcaggagggggtacctcagcaggtccatgttgagacccccccccgaagtatcagctatatgatagataggtctagtataatgaagtttatttgggggcatgagaagggaggctgagaagggtgtagaggcagagaaagagaggagacagagaagggcagaaagagagagagagagagagagagagagagagagaagggaagagagaggagagagagagagagaagggaagaggctggttgggaacacgtggagagagaggggtgaagatagagaaggagagagagggagagaaagagggagggagggaggggagggagagagagagagagagagaaagagagagagagagggaggtcaaatagtcctttttatagtgagccaggctcctacctgactgttgctaggtacctgttgggcggagcctagaagtaatgctaataatcaccaccttccaccttcctgggcatcctgctttagggaagttctttacactaagctggaacgtacacacacagtagtcttcttattgggcttgactctgtccagttcaaggaccatgtagaatgtgtctacgcacagttttgggacttgtcacaagactgtaccagatggggtctcagatgctcagtgcatcctttcccatgtgacttgtggctctgctgaagcaaacatactgagtctttggatcacccactccaggaaacactgcccgtgggtgtgagacggtgtcccttccttctcctgcccttcttggctacttaggtacaattcttggctactatccaggtgaaatccatgagcaggccttggcttgggacaggtcctggttcagagttagtgtccagccaataccaaacttgttgaactaaatcggaatatccatgtgagggacaatcaatgtccaggtccctggtgaacttggctcctgtctggccttgtcctgactttgcaatatggccttgggcaggtcctgattctttctgggcctctggttcttggctgcaggttggatagagccatctccacatgcctcagacaggcttagtctccaagtgtcttgctgaatctttttttcttctgtacaatgatcacccccaaattccttcactgttctatctagatctctgcccaagccgggtataaacgtggatataaatggggcttagaggtgcatatgtagcaaagttccagtagtgacttgataaagcaggtcaaaggagtctcaaaggatggcacttgaggacaaatgagtctgtctgtcccttctctaacctgtttcagtaggacagaggtcacattacagtccccatttctttctgagaacatagcattatcctagcataggctttagctttctcttttcagtcctaaccatcactttttagtgtttagggacgacacatcggcctgcaaggtaatgggagtgagctaatagttagtggccatcattcttccacaggccagatgcacgggtaagtcagtggtaagcaggatggagtccctggtactaatatgcttttgtactgaagaggattccgacagcaagcagatgagcaatcaaatagatacgttcgggttgcgggttgaaggttatacggactcaggagatggaggcgtgaagactgagtatgaattcagcctgggctaagtactgagaccttgtctcaaagggaacacagacgataaagatattaaaacagtgcgtgggttcagggcttagctcaagagaccagcagaatgaccggacccacagttagagatgaacagacagatctacagccaggtaaacagaccgtggggagagaggctggtccaggcctgcaggcaggatggaagcttcagggacagaaagaatgaagaagggaggcaggatctattaagctgatgactccaggccttaatcctgtgccaggcccattcgggcagtgtatgtagggggaggggagcaccccccgctggggtgtaatttcacgctgaagggcctgatggggcatcccatggactgatcctttctggatcagaaaacccacttccctttgtcgcatgcagggcgattagcgccttaaccctttgtaggctggctcagggccagttctgccccaccttgcctcctgtccctggggacctagcccagagtccttctttgctctcagcctatccaactcttagatctggccctgtatctctgtgtgtgtgaagcttcctgagtagggaaggcctaagaagaccagggaatagattctagaacaatttctgtccatgtccctgttctctggcaccctacttcctctgactgcttttactgccagcaaaatggcgaccccatatgtggggtcctccttttattacattttaatttatttagtgtgtatgtgggtgggtgtgcgtgcatgcatgccacagtgcacacgtggaggctaaaggacagtttgtgagagtctttccatcatgtagactttggggatcaaactaggggtgtcaggcttcgtggcaaacccctttacccatggctctgcctcagtggctctgcaggtgcggcgcctcttatagctcagttcagtccacactcctccaagaagtctaaagtccagtttcctcccttgcttaactcaaaggctggaaacccaaggccacacagtcttcccataccccctgcactggggaactcactacctctcaggcaataaagccagaatcctctactcccaatgagtctcactgggagtgaccattgacccttgaggccaatgaacactcacaggccatgtgtcagtaccatcccagagatacccctggccagttcttctaatagtgacattccaggactaagtaggccatcatatccagccccctgcatttatggtctcctttgctgataacctcctctttgtgtctccattcaaaggcccaccaggaagtggtctcacctttggctctgaatgcccttgcacctttcccaggctaacttcaacatatccaggggccactcccctggcttgggggagaagggcagggaccagacttggcctcctttaagctccctgggtctctaaaaccccagtcccattaaaagaaagcccctaaatgttatttacacttcggagtcttaaaaaccattaacaaaagccacttaattcaattatcttcccggctggctcggttctcagcactgagcactggcctccccttgccacccctccccacacccccactgtcattgtgtcgggctaatgaggtaaactgaagcgagcctgtcccccctgacaggtttatgagaatttaataaagcgtggccgggaccaaatgagttgcctcagccttggagagcgcattgtcttcagcgtcagcgttttttgactcaagctgccccctcccccgccccagctcttgcctggctcagccccaaccctcacccttagtacctccctaggtaaacccaaagtcctgtgtgcctggcagaggctggtgtggccctgcaagggcagagctcccatgctagtccctgagaaggacagaaagtaaatctatcagttgtccctgggaagtgtccctttgtgggcctgtaatccctagcacacatcagaccccagaaacagacctgggggacttctgctcatgtactatagcccctgccaacctgaggctaatttgggcaagcctcactcttttctcgcttgtttgaagtgaccagccaaagggagcttcccaaatgagggtttttttctgcctgcaagggcacatggtgggttctagggtctccatgatggcctggactccttctttatatggattgtcatctcatgttttcaatgacaggtagcagagggtggagcccaggaagcagcagggatttgttcaaggttccaaggttgtcataagtgcagatgggagaggcttctaggctagacccaccctggagcactgtgacatcctaagaaggccgggtgcccttcttcctttatatcccagctgtcctagaaccagcctttctctgcttaccctgtcagagacccaaagacgtgagcttcaggataacccagagacctagaattcttcttatctcctacagaagtggcgcgaggaattactacctgtggggatagaagctagacctgaaaggagtcgtagcatatcttcctatcaatggagtatcgggagagcaaggcttagtgatcagtgagtgtgattgtgatgaaggctcaatcatgggtctatgaccagagtcagattggattttgtcagtcggggctcagtaaatggactgtggtcagagctgtctgttcccagggcttgagctcagtctataaccaaaacaagagctagtgtatgtccatgatcaaaactcagtttgtgtctaggtcctagttcaatatataatcaatgtataataaaggtcggggaccagagaagttgttaataaagaccgggttcagtatactgacaaagcaggagcaggactcagagtgtaatcagggtcaagttcactataaccaaggaccaaggctcagtatgaaccaaggtgagggttcaagatcaagtctagggttcagtctacaacaggctcaggattgtgtgtgtgtgtgtgtgaccttgatgcattttattttcaggtcaaggcttcctcggtagtttctggttgtagaaatggataatttacttagtacatctaggtgactaacctcctgcccccgctcccctgctttccctgtcctttggggtctttggccttcagaagagagaaaaagaaaaaaaaaaaaaaaaaaaagattgttcaggaggctggaatcccctgtcatgtactcagggtgccctctggtggcagtctctaatagtgttgattttcgcagacttgaccagctttcgggaagcctaggcttctggtatagttatggaagtccacttggttgtctctgtgctcttgcattactgcacaccacccaaacaggaatagacacagggggatctgcaagtagacagtggacacccccaagcttttctcgtctcctgtccagttggcatctataaaccctgataccagactagaaagctacgtctcaactgtatgatgggagtcgcttcctttatccatcagtttgacaggtatcatcgtcacctacctttgacaggtataggagagaacataataaagatctccacttcctggttctcactcctcttcttagtcatgaactcctggccacagcacccatagaagctcactggcaccagctgaaggttcgcagaagttcagaacatcctaggatctattctccaccagattaacaggttagactaaactaggtttgaggtctctgcctctacctgtcctcatatgtcactacccataggccagaggttcctacgtttacataccaggggcctcttttccagagcctgagaacccaggtccttcggggctgctctgctgggctgacagctactaaggttctcccagaatatggcctgacagtctatacccaaatgctctaggcaaaattttagcacttcctttaagagtcttttctttccttccccaggaaatcagcagacaacttgtcccatttccttcagagcacagtgtagctgcttgcagtggctactccagccccagccccagccccagccccagccccagccccagccccagccccagccccagccccaaccccagccccagcccctactcaggtttacagtaacccccaagcctgccccttgttttccggctctcccttcgatgctgttttctgcacagcaggcagggaaatctttacaatcataaaccagatcttgccaggtctctgcttaaaaccctccagtggctcctatctcacaaagaataaaatccaatgtctcactctgtcctcaccaagcttgccgtgggctggacaacaaccccttccacacaacactaacatcactccctccaatctctattgcccttctctctcattttgacacaaagaggccaagttcatacttacctctgggctttttcaatgaccattttctgaacttaaagcattcctgctctaccttagcatggctgactcctgtcactccattcagaatttagcttctctcagagaccttccttttttttttttttttttttttttttgtctcagagaccttcctaactgcccatgttcctgagatatacctccctactgtgatttccagtataggactgtttactggttgtctcctagttgtgtgtgtgtgtgtgtgtgtgtgtgtgtgtgaacttggcatatgtgcatgtgtggacatgggtgcccatgcatgtgtacacaggtgcagtggccagaagagaacatcagatgtcctgctctgtcactctctgcccatgctcttgaaataggacaccttaagctgaatctgaagctcagttggtggcctgcaagccccactgatactccacacccagtagcagtgtactgggttatagacccaagggcatgcatggctgggctcagccttttccattggttctggaatctggtctcagtccctctgcttctgcagcaagcactactacctattgaaccatttctctagtcctgtttactgtctgcttccccaggtagaatgtataatcccagtcctgggcacatggtaagattcaggaatgatctgttggattcatttataaaaactggctctcagtggccaccctcatttcttctagtaggactagaaggaagacatcccagtttctgacgcctatgggttccctagttcagtcctgcagcaacttcctctgagacgcaggacttcctagagcaccccaagttccccatggcaaatcctggggagcactatcctttcaggaggatcagttccgtgttcttcctgcagctctgtacctctggggatcaggtgatcaggttagagggcttagtcttctgctgtgccccttgcaggccttaccaggctctcaaggactcctccagccagggagcttgctgtcagaatcccatcctcctcttaacagaaacagctgtccagtggcctgcctgcgaggggcctgcagaggtgtgagtgtagagctgttctttggaaccactatatatatagaaaatggggctgctccaccgtctcactggttatactacactgaaagggtctgtcccttagctctcactggggagattgtataaagggaggcaaccctgggaggcaggtctggagacctgaaggtgctttgctgggatagattggaaagtgagcctcagggcacttgcgtgtctgagaagatggagtgcattcagatgaaagaaataatcatcttcagctagggtgccaggaaggggctctagggagccaatgccctcatgctgttttctctcacaagtctgctcacaccactgattttcgatccattgttccacttaccggactccttatcttcctcctctccagtagctaactccagaacaagatcagggaatcttcttgcgtgggggataaagagccccgagggtgtaattcagggcatctgtcagctgggagagggctaggcctaacactgcagggtgtagaagggtgtcacttcatatggtgttaggggaaggcaggtccagatcccacttaagactgcatcaatgggaacctctctttctggctactttcaagaaagtggaagccgttggtgtttgggatggcagagcactaactcagaagagtgtgagcctgggaatgaccacaaacacacacatgtgcatacacacatgcacaccaacacacacccaatagaggtgtcaacatgttccaagaaggggccacgtgttccaggtactgagtgcttcaaaggtcagaccaccggcttgtatgaacaaatttacttgctggtaaatttgctttcatttagatccctgggagacagcaggaaaggaggacaaggcagcagatgaaggaaaaaaaaagggccctagggctgttgggaagtacctggtcctcagtaaagcccagcatggacagagaaagaatgactgataaagcccagagtggctggccaaggagttaccactgtcaagggaatggtgggtcagcatggccagcatcagttcttgcttgggtacctgaaatgagaaggggggctagctcagagtcacagaaccttcccctagtcttctgttccctgtgccttcttcttagggccctccttctatggatatcaggagccctcatccatgtgctcagatcacaggctgggcccaaacatcaagcagagctaggcctgaaggtctgagctttgcatggcccttggagctcctctcccttccctgtctgtgctgggtggctacactctcaactgctatctgtaatactctcctacacatgcgtgatgtcaatagttatcttaaacagggacatacgtgatccaagcaatcactcctgaccccacccagccatacatctgacagcttctcccagggacatttccaggtatacaggatctcagagaccatcttgtccagtcacacactcctctcccctggaatccctttctagatctccgaggagggctggtgccaggatgctggtgtttagctataggctgccaccattccaggatcctggtgttcatcagaggccccctcccccacctgcacatcacagagtactgacgcagaaggtgctttattgagcgaggcacagcattcgcatggtgtggcacagtcatggcggtgggtgctgccaggtgggtgttgctagcagtgaaaaaaatcacacacagaccttcaggactgaaaagactcctcaccagggaggaccccagcctcagctcctctgacctttgtcagacagaaaggatgggtgtgctctatctggcttatcccagggaccatcctgaagtcagaacctttgttccccaattaaacctaaagggtttgttagcctagcgacaaggaggagaaaggcaggatggctagatgcctgccacagtgcacagggcctggtagagctagctcgaccttcacccctctttccactctgatggccggccgacctagatcctctagattgaatgaagttccctccataaagctcaaatgccacagggagggtcagatttccagatccagggtccagtctaatcaacgtgggaaggaggaggggagggtgaagtagagtttagagactccacctaaggggtcaaagctctgctctctttggggtgtgaaagccaatcccatcagtacactctccctattggaagttctagagatggtacagatgaggccatttgtgctcagtcctgggccttccctctcccctacagcagcctcccctccccgctcctcgtggcccactaggaggcagccgggtcccgagggaagttaagctgcgtcccttcggtgcgcggcaagtagggggccgcggttgccggtgcgggagggtccagggcaaagaggccggggccggggctggagcggccggaggatgcagcagaagctgctggactgagctgcaccgccgtggtgtcctgtgccgtgcgctcgctgctctccatctccagtgccacagtccctggacgcccgccaccctgacccgcggtggcagaggagcgcgcgcggggcacggggccccggcggctgcacacgcagcaggcagcaaagaagccgagcgccagcacgagcagagcgggccccaccaccagaggcacgttgtgtcccggcaagaaggcggcgaaagctcccaccagtgtcacgttcaggcctgccagcagcacgcacaagccacaggcacagcatagagcgggcgacggcaggctacgcagaaggcttcgggaacggcccgggggcgctggggccagggtctctgtgctcttctttgcttgcggcatcggcccgcccacaccctgcacgggtcaagctctgtcccgctgcctgaccagagtggcacacatgtcaggggcaagctctggtgatcctgctggcacacagtaagagagtgagtgagaagggaaggagcttcagtaacctccaatctgggctcagttctgtggctgcctgcagtgtcagcaagttgcccaggacatctttaacagccctgggaagcaacccatccaatgggaagaatctgcaaattgtttcccccacctgtccatgaagtcccccactgctagtcttaccctcacctctcttccaggaagtgttcaggctgtaactaagagactaagtgtgtggccagagcaatgacttagcagtcaagaccactcactgctcttctccagatcctgagttcaattcctagcaaccacacacggtggctccgtaacaggacctaatgccctcttatgtgtgtctgaagagagggacagcatataaatctttttttcttttcttttcttctttctttctttctttctttctttctttctttctttccttctttctttctttcttttttaaagagagactaattgtaaagtgcaggtcgctggttaaacgaacccttctcctcttattccttagtcctaaggaaaaggcagctttgggggtttaaacagttttcccaccctccaaatggttgaggcctggggctaatctggtctagtttcttcttgctcagctgaagaaaaactaaagcacggagatatctagctgtttacctaagagtcagactcaggatctacgagacctgctgcctgccccacactatgctctggtagacacagcagtgataccaactctcctgagcatcagatgaggctctggtatgggtggcctgtgaacgtgaggaagcttctgacattcagctgagggtgcctttccccatgatctggactcctggccccttgctagacagtgcattctagtaaattccagggcctctccatttcaccacctagggctctgcagctggacttagcttcaaaagccttatctatggggccgggagcaggatggctcagtaggtaaaagtgcttgctgcccaaggctgatgacctgagtctgattcctgggacacaagtaaaccatccctgaaacaagcaaaaggccagatgtagggccaacatctctaattccagcacccctattgcaagatgggaggtggagctcactgctcagctagcctggggaacacagtacagaggcagaaacaagagagactccaccttaaagcttaaaacaagagggtaggaaagaaccaagtgagaagttgtcctccgacctccacacatgtgattagcatgtacacacaaaacaaattaagactgaaagtccaatctctgggtgttgaaatccctttcttgggatctctatatgggtctagttctgggaataccactggcttggtaaaaccagatctatgcagaagcaacaacaatatagtcactgtgtcaggatgtgacttctcaaacaaaacaggagcaggacacggtggcacatgcacgcctttaattccagcacttgagaggcagaggcagatggttctttgtgatttctaagccagcctgggctacatagttagactgtctcataatcatcaaaacaaccctcaaactccagcatttatgacttgtatttgggaattctgacttataatatgaggtcacaggcatcaagcaggacctgggagaacatagtttgtgagctgtgttgaaattgtggagcaatgttagagataggtcctaggtagagaggtgggtaaccaggtggctccgcagatggcactgcagagagagaaacagggaaactcacactgtgctcacctgggaggagccaatagtgccctcttgacctcttgacctccttctgttgctgcagtaaaatcctcctggccctttgtgtctcatcccagctaaagccctcaagcccagcacagagctctgaagagtgaattgtgtgaactaaaagaactttgctttagtgactcctccaagttgtctggtccatggagatagcccagggttcatgctggcaattaagcccagggcctcaagagtggaagtcacatgctctacagctgagctagatccttagttttttttttttttttttaaacatggtgatgctaaatttctaagctgcctgtggtagccttgaacttgtgacccttctgccttacactcacaaggaggtgaagttacaggtgttaccaccgcattccaccaccaaggcctctatagaagggagaaattgaggctgggaatgagaaaggtcatggagggagactcttgccaaacctttcccagcacggacaggatgctgatcgctgatgtctgctacccatgatcctggctaaacagttccctctccctgccggcctgcctctgtccaggaaggccttgtgatctctgtctgggaatctggtgtagaagcttttggggaaagggcaggggaagaaacttggggttgggaagtaatcaggtttgaattttgagctgacagacaacttgaaatagctgggacctctcctcaggacctggacctgagctgtctgaacataaaaagaaagggataggacgggtgatggttatctctgaactgaggtctcttgtcaacctgccccatgcttaacttcctgaggtttgtgaaaataaaaataggtgcctgtttagaaactcctatcaaaacatcacatgtatcataaaagaaacccatcgaccagtaacatgactgtgtttaatcatttctgtaaattctttcctttgggttgaattaagctattccctaagaagtcaccgttgcactcgggttctgattctgtgtacacgtgttagcatttagttcagagaaaatgttatgttcctcagatcccacacacacacacacacacacacacacacacaatttttaaaaagtctatagctgagccatgtggtggtggcacacacctccggtatcagcacttagaaggtagaggcaggcagatctcttgagttcaaggccagtctggtctatagaatgagttccaggacagccaagactatacaactataccaagaaaccctgtctcaaaaaaacaaaaacaaaaacaaaaaaccaaaaccaaaaccaaaataaaacaaaacaagactgcagccattgattgtaattacccaggtaaccattagtacctggggtggtcatcagtaggtggagctaagagctagctccttgaggggaagtttctgcctgaagcccctatgtgagcctgtctcctgctctaagattctctgggtaaaagcctcaggacgttgacaaagatattagccactggctctgccttgtctcccaccagtctttttgctcagtcaaagcccttgttgtcccttgagtgggaactcttttttttttttttttttttttttcttagtctctacagtttgtgcgaggcctctcctctggaagcccagactaatgctcactttatcctcaactccacccatcctcagggaacctcccccgttgctgttactcattgcctgctggggcttattcattacactgaaagttctcagctcttgccaaatggattctgcctccccagggtccagagagacaccatcatctcttctcagttaatggctagaagttttcccaccctctgacatatgcaaacacacacacacacacacacacacacacacacacacacacacacctagaaataatgcttgaggaggaggacgtttggaaggcctagctttctagtctgtgtgtgattcctgggctctgtcatcccatctttcagtgtgtgacacccaccgccttcactcattacatgcacactcatggaccaaacataccccggacactgctgcactgcatgcagaactgcagacacgggctgacatattcccatctgatggagatgagcttctacgtagcagttgtgtctctagacacctcctgcttggtgctggtggagggtgagtgaggggcctgagaacagtgacccaggagaggtcatggggtgagggggcgggggttctgattcagatgctcccacgataccttcctgcttacagtggtcttcatgcctctagccagcaagcagttcgagaccccatcatgggccatttcactgtcacacacctgcctgtaaggtaggagtcacatttaaaaggtctccaacagacttcagaggctctcattgtagcacagtagatggcccaagggacaaaggactctgcatcagtcacatccctgtgtccattaggctaaccttcatatccatgcaggcaacagcggctcttttatttcctctcagttcttcctgatgctctcagatgtgttcctggtcccaagccaggggacatgcatgggcagacttagtctagacctctgcctccacaacagcaactcagctacctggagcaataggagggatggttggtagggactttagactgctggagtggggctgtccttccttcagctccttctgaggcttggtgtctagccccacttatccctcctccccatcctagcttgctgaggtcctgcagtcctcctgacccgtgctcccttagttctttgacatcttatctccattgcccagttccttcaccccatttcagctgccctgctcccatggtgacctccaggacttcatctcccttggcattaccctggaccagcccaccttggagaggccgtatatcgtgttctccactatccccctacttccatcacagtaagactctgtcagcacctactgtgtgcccaatgatgttccaagctgttatggttcaaatatggctcatctctcccaaactcatgacaaaatcagatttcttagtggtagggcctgaatgtaaggccaatcacttttaaaaagtgattaggaggactggagagatgactcagtggttaagagcaccaactgtccttccagaggtcctgagttcaattcccagcaaccacatgatcactcacaaccatctgtaatgggatccaatgctctcatctggtgtgactgaagacagctacagtgtactcatatatgcataaaataaataaatatctttaaaagcaagtgattaggagctgagcaaggtagcatatgcctgtaattccagtacttgacagaggcacacacacacacacacacacacacacacacacacacacacatacagagtgagattctgtctcaaaaaaaaaaaaaaaaaagttagggaatataggccagcctcttctcttagacttcacagtctccagaatagtgcaagttactgtaagttccccagtcttaggttttgctataacattagaaaatggacaatgatataaaccctttatatacattaattcatttaatcccacgacaatcctaagaagtaaacacatcgccatctcttttagacaaacgagaaaacacagattccggttatattaattatccaaggtcacaacctggtggtaacacacggcaaggcccagcctaaagtctgggctgtgttgcccaagtctgtacctaagccactgcagctccaggattgcacactgcccctcgctgtagctgttttttggtggctagagccggtcccaatggtcctcatgcctctgatcctttctctgtccaccttgatccacactgagtttacgttagctacttttgtgatttttgtctcatctctctatcctgccagtgctgaccagtgaagctcaaccctgttgcagtccagcttcctgccttctcaagtcttcacccaaactcttaagcctaggagataaaaagaaaccttactgggtatcaccagtccactgcatgcccgcaactgcatggtcgcaactccccttccgggcctgagtgagagtctcagtgggccatacctcctcctgggaattgttgcctatcccatcttcaaccaagccagtcatggttttgagctagcggtctcttcccttcttgaatacatggcctacaagggccacgctagtctggtttctgtcccatcatgttcctgcctctctatccatcattgtcaccagtgaccccttgtcactgagcttagtgaacattgttcagcatttactttctgcttttgaagctacctgagccatacttcctgggaacactgcctcttgatgtagatttctttactgttgcccttttccacaaaggttgcaaactcaggacccaagcttggccctggtccctccttcatcctcaggctccctactatacacctgcaacccctcttgggacctcttagatccctgccacggatctttgcagtccattcttttttctcttctcccagtaattcaccttgttcatcccccatttctcattgttaaacccgtcctggaccctctgctgctccctgagctcagactcctccaggaagccctcttgactcttctctgctggggctgagctcaccagcgggtctccaagtcagctctgtcctcagctagttcccccagctctgccttcctgtgcagacggtgtgccactcagctcagggtcccctagtcatagggcttcctgtgtcgaggactgtaggcccatcgaggtacctgtctcttctcagtgctccatgattattagcgacacaaagggaaagggaacactgctgggagaagccagggaaggctgccttccgggcttcacttgtctctcagatttggagttgctatctgccagcttctctcagctttgggcattggagaaagcaaaggaagctacagggtagagtcaactgttaagagcagcagggaccagggcagagtaggggagtcatggcagccaatctgtctcctgttctcttatcctcctttctcttttaaacttgttttctcaagaccagaggtcctggccccttgtctggtaccttcccatctctcggagttcagagcaggataagcatctccccctttccttcagcaaccctcccagagtccttgcccactcattagcaccctcttcccccatttcctgcaacttcacttgcctgagagtgtggacacttccctgcagtgaccctgctggcccctgaggggagtccaggtgtcctgtgttagaggggttggtccagctcgagtcgcgggatccgtgcctcgcctgggagagctggatcagccaaacgacccaccgcgggtaggggatccgggagaagggagatgagcggtcagttcctctctgtcgactctcagcggcttcagtggagaccgtggcagcatcggcggttgagtgggaggcagcggcgcggcgcgggctgggtcagcagagcctggctgtggtctactgcaacctcgcgctgcgggcggagccccttcccagtgtgggctgccaacctcgtcgggctcccaccagttgcctccagccgagaagcctcgcacacgcccttctcgccttcgctcctttgagttcgtgggttgtgagcaccggagcaactaattccccaccgcccacgctgtctaggctgtagtttttcccaccctgcgtggaaacggtgcagctcctttcaggacgcccctgcctgcattctctagcatttctgcagccctagtacgagggagggggagacagagttttcccagaggtgaaactttgttgttggtttcagcaccactcccctaattagccatgggcccagcactctagaaaggggcgtggccacgtgtccctaaatggaagtctagaggcagcttacactggattttattgcagaggcctagatggacatggaagagtatggctggaggacatctctgcccactgtcccttcattcatccattcacaaatccacctgatgtgtctacagaggatgggccagtgatgatctggcacagccgttaggcccaaggctcccagcttcttgctctgcccctggaggcctgaactaagatgagagtctcatttccacttccttagtgagccattctccttcagagagatccagtgagggtgtgactccagggggctacctagatccagcatcacccagctttggtttactgctgtgttctctggaccagctcagttatggcccagggctcaggtgttgggacttctagaaagacccattttcctttctgagtagactcctggaagagatccccttcccactgtccactcctatatccattaggaccactggagcgttctgttgctgctcaagtactaaccaagaactacataaactactgcaagcttggcccacctcctctcttctccaaaaggaccatgagagaaggtttgcctcacaggggccactggggaggttgtatctaaagatccacgtgcgctggaggaatggtttcagaaagctcacagcagggaaaagagggggatggtaggggaaggcctccagaactcccactcacctcaagactctgccagcttctccaatgaatgtagctcttgcttttttcctgtgattttattttaatttattccttaatggtcacaaatacttgtttatgcctggcctctcaggtatcaggcttactgtatcctattttagggttatcatgcctgggagggtcaaatagtcaggagccaccttatccatgggcttaggatattatctgctattcccaccatctgcctttgggcatttctttgaagcacagaggtcaagagtgaagacaaataggaggaaggggtgttccttgtctatcagggaaggggtgggtggtgatggggctgagaaggaggaagagacaagtgaagaggagcaggcaaaagtggggagaaagctggaggaaccagtctctacagctgaccagcattggtgaaaaatcaccccttgtggatgttagtccattgctggcagggagctgagctctgtggctatgcagagaggagacctggaggcagagcttgtctccatgactttttctgggcacctaatgagtcctttatcctgagatatctcagctttctcatctgctcaagatgggctctcccatgtccctgtttcccaaagcctagctttctgctctcatgcttaacaaagagaaacagaccacagccactcaagtgaccagctccccttggaactactggagcaatgtcagagaaggcttctgagaagagtcatctgcattggtcctgcaagaataagactgtttccagtttgttttctcaaagcaagacaaggaggatgtctgtggagatcagacaatattgctgttcctggagctaaaggcatggaggctgtggcagccttctgctgggcatgtgcacctgaacctccctacctgaaaccttgctgtggagagaccagaatgtacctccccaggaaagcctagtgggcaggttttttcaacctaatttaagccactagcatttgctgagcagccactatgtgccctgacttgtgctggggattggggggggcatcactcatcatatttacgtaggcttgagaattgattttgtgagcgctagggatagagctgagtagagtgattgcctagtgtgtacaagaccctaggttcagtacgcataacagagaacacataaaattgctaactttagctagaaatcattgaacacataagataagcttaggctatgagatcctgtcttaaaacaaacacaaatgtctttgtgaaaaagaattcaagccttgctggaggttctgagagggggtggggtggggtcacaggctgctagaacaggacatgggagccatgtagctatggtattctgagatagccttctagagaacacaagggaccttcttcttgcaaagaagattgggaagaataggagatggggtattgggagggctgtgtggagccaggtgcttcacagccctgagtgaagatgttcaatagcaactgtgccagcactggacttatctggaaagttaccttgtcagtgaccatctctgctcctgacatagacatgacagcctcagccaggacccccgtatatggctcctgtgttcagcttctatggccaggataaaacaaccatctttgactctagtcaaggcccttgatcaaatttcaataagggatcaatgaaggaacaaagttgaggtgttgtccagaacaatgaggccagggcaaaggggtcctgtgggtctttccacgattctgggagtgaaggaatccgttagggagagcatcactggaagagaaggtaggcccagcattcccagggctcatttccacatcgtccagcttgaaggaggaccccgagactggagtgtggggagtgggaagggtgcttagccctcctcagttccccggcctccaggcttcagcttctccagggttctggtcactgtggacaggccgctgcgggctcctggaagagacagcaggatagggatgcctgagtacagacccctactgagatgtcagatcagaaagtccaagaaagcagggatcgggatgctccaggcagagctaggatggagagggagatggggagtcctagggaccaagtacagtgggaggagctgctgcttcagccctggtcccactgcctcccagatgtgatctcagatgtgtcatgtgatctttctgcccctcagttaccccataccaaaaaaaaaaaaaaaaaaaaaaccaaaaaccaaaaaacaaaaaacaaagaaaacaaaaaatgaagtttattgtagtacttcccagcatgctgtttgtgagagccaagctgttaatgcaggtaaaatggttggggcagcatctggaatggactcttctgctcagtaagctctaggagaaggacatatctacatatggggttgggttgccttggagacactcccccctgggtttcccagtgtggagaacagggtcaggaagggagaagatgcctagtttcaggtattatgccaagagccacatttcagcaccaggaggagagtggacagtaaccagggcatgaggcccagtgggtaagggaagagaaagcaggaggcccccagtccaagcttggcaggacagggaaaccctaaagacaaatgagaagggcttgcacatatggaagctgactcaacatcactgcttcgcttggttggggacccctccctgcttatgaccttcagggctcctcccaggacctacagagctgctccatcagatagcagagacaaaagatggcattcagaacgtcgggcacttaccttctttattgctgttgttgctagatcttccctccccatggtctggtcctgagttaggatggattctcaggtttcctgcaggatgagagcaccccaaattcccatctactgggttattcccaaatcaagcctagctcttcctgttcttcctgttgtctaatctaatgtgttgccacgggtgggtggctgtctctgctctcccgtgctcctctaggtcacattatcgaggctgatttggggaagggcagaagaaacaaatccttgaaaaagtggtagtgatttttgttttgtttttgagatagggtttttctgtgtagccttggtgttcttggcatctactatgtaaaccaggctggcctggaacctgctctgtagaccaggttggccttgaactcagagatctgcttttctctgccttcttagtgctgagactaaaggtgtgcgctgccacacctggccagaagtgttttttaaggagggaagtaggtgtgtgtgaagctgcataggactgagggtgttgggagtttgggtgcaggctgtggaagtcaggtgggaactattaagaggttgtgggacccaaggcagaagagggtatttattgggctggggatgagagtgtcatctgtagagcttggagactttgggaagcaaaacgactcttaagggagactgattcctgaggtttagccatgtctgctcaggcagctgctggattctgctactctgtagccatggtgacactggcatagaacacacacacacacacatacacacacacatccaggagcagtctcacatatgggcatgctcactgacagtcactcacaggtttgtacacaaagggtttgtgggggaggaaatgctcacctatggcaggtaggatgtggtccaggttgaaccgagccttcaggaaggggtaggcgaagatgaggagccctgaggagggacacagaggatgctgtgatggggaaggcctgattggtgtgagatgtaggaggtaggggtgggtggtttgtttatgaaggtgatgtaggaggcacagaaacaaaggatcagggactgtgggggtgcaaattggaggtgtgtgcgcgcgtgtgtgtgtgtgtgtgtgtgtatgtgtgtctccccagcactcagctctggatggggattcagtacctatctggggaaggagctacatgctatgcaggccacaggtttgcaggctcttggctctaggctctgctcaggtaaagcagattggtcacttaccatccttggctagaactgggccaggtaacaccaatcccactgccccctccccttccatctccagctctctctcttccaagacctctagtgtggccttctaggctccactgctgctcctctccactcaaacctgatggtcaggaagccacagggaggggacctgccctgctgtcctcccagattgaatgctcctggcattcagtgtttaaagatatggagcttcaggctctcctgggacagggacgtagggtgagaggtggcattctacatcaatgggcctgaccaggacagacagacagacagacagacagacagacagacagctgcttgctgttgactcaatggaggagagtcttgtctgagctgtcttgttttacaggactctatcaccccattccatctaggttgatgaatcctgctacaaacgcaagatcccaccaggtaaaggtgttggacaccaacccgtcttcccttgccctcccagcacactcactcaaccagcccgcagccagctctccttcctgcacgccgaggctgcactgtttataacttcttaggctttcattctctccaaccactgaccagccaagcccttcacctcttattcacctcaccagacccctgcttcccagaaaaatcccctccctctgcctcagcttgtgtttgctcaccaagcccagcagcaccaaggaagataccacccacagcagcagcagccttggacacggagacaccgatgatgatgctgccggccaccaggccgagggccacacaggccagctgcaggcagcggaagtctctggtgctgatggggatgtccatgcaggtctaccctggggcgctgcttccaggcctcctgggagtcttggacttcttggatggatgcttccttgttgggacgccacacccagggtggaaacttttgggctgtaagtctttaggccggtctgggcctgggatttatctgcaaccttatcccacagttttccaggggcccggaggcctagcttgacctcaacaccccagtttactcttccttttgtgaagggctctgcggccagaaaccactttgggggttcctgcctggccacatttccactttggccagggttctagtgacgtgggtctgcctcatggggtcctcctctgtcagctgtcacctaggatctcagggagctgggcccaagttctcttgctcaactttgccagctctgtcgaccctgctcagttgccttggagcctgggcctattaaagtttaaagaaatgcaaggcgggggtcaggggcaggcctaggaaacaggtttctcggaggtacaggcagcaagcaggtgatgagttattcatgagcctgcaatatgagcttctgtttgcatccccagggtccagtgggcaggcagcctaggttccactgttggttcctgagcaggaaggctgggcttatggcttcgtatgaagctcagagggtaaggatgtgaggagactccccagtcacatgctcaaggctgaccctgctggtctctgccccttggcgtagcggtgcacctggggccctgcttggaaacatggaaggaggggtagtcctccaggtctactcttcccggtgcctcccatgcttctccaactgttctgtcagctgctgggcctaggtaaggctgagagctcttaacctaagccttgatcttaagacatcccatttatctcaggtaggcattggtaccaccccatttaagcttctagtaggaggaaaggctaaaccctggcaattcctggctgggaagagccagctgggtagggtagggctggacagagggactgggcaagaagtgtcatgaaactgggacatggtagggaccttttagcttgaggacctctagccagcctggctgacatggtcatcctgtttggaggaccaacccaactaagcctgagcagtagtagcacaaacaagtccagtcctgattcccatccctctttcctagagcctagctccaaccctcatcaataattgcattccctgaatctatatggatcagggtattcccagtcctccagcacagacctgttcccttctctaacctggggacacttctcaaagccacattaccctgcactgaatccccaggcctcccttccattgctcatttctcactaccaggccttcggtctccatcagcctcacaatcccctctctccactgcttctccttcctcaagctcttttttccttctccctgctgagcatttgcctggtgcttgctgtctagtaaacctctccttgtccctcaagacctacatggacagccattcctgtgcagccttcctgaccatgcctgggctgttctgccatcccgc

SEQ ID NO: 897 - DNA, 2300 bp, Mus musculus
atggcagcctcaatgcctctggctctgtgtggagcaggctactacaagaagaagctcatggtcactctccaggcctggggtggagctgacaggttgtccatcccagaggagcatcctggggaatgccagagggaggtggccttgggagctgttaggtttattcattcctgcaactcctgggactgtttgctgctgaccacatttgagttcctcctctggatttgccctcagctgctcccccaagaccatactctcctcaggcttctcacagaaggaatggacattcagactgactgtccctgccctgtctctggcatcgtgcaggcaggtgaagaagctaagactctgtccagctccagtttgggtgaatgttccctcttggatctaggggtggggcaggcggatgccgccatgcagcactatggggtgaatggctactccctgcacgctatgaactcactcagcgccatgtacaacctgcaccagcaggcagcccagcaggcccagcacgcccccgactaccggccatcagtgcatgcgcttacgttggctgagcgcctagctgacatcatcttggaggcccgctatggctcccagcaccgtaaacaacgtcggagtcgcacggcgttcacggcccagcagcttgaggccctggagaaaaccttccaaaagactcattacccagatgtggtgatgcgcgagaggctggccatgtgtaccaatcttcctgaggcccgtgtacaggtgtggtttaagaaccgcagggccaagttccgaaagaagcagcgcagcctgcagaaagagcagctccagaaacagaaggaggccgagggttcccacggagaaggcaaggtggaggccccagcctcagacacgcagctggaaacagaacagcctcctggtttgcccagtggtgatcctcctgctgaacttcaactgagcctgtcggagcagtcagccagcgagtctgccccagaagatcagctggaccgtgaagaggactcccgtgccgaggagcccaaagctgaaaagagccctggatctgagagcaaggtgccgggctgcaagaggggcagccctaaggcagattccccaggcagcctggccataacgcccgcagccccagggggcggcctccttggtccttcccactcctactcctcatccccactcagcctcttccgtctgcaggagcagttccgccagcatatggcggccaccaacaacctgatgcactactcgtcttttgaagtgggcggtcccgcacctgcggcggctgcagctgcggcggctgccgtgccctacctaggggtcaacatggccccattgagctccctacactgccagtcctattaccaatccctgtcagcagctgctgctgcccaccaggggccttcaaggactaagtggcttgcctcttttacctttaccttcagccctcctttgatgagccatctagaggaagactgtgcagccgaagcctctagcctggctctagtagtggctgctattggcaaaggcttcatgtctgttttcagtcctgcagcaacttcctctgagacgcaggacttcctagagcaccccaagttccccatggcaaatcctggggagcactatcctttcaggaggatcagttccgtgttcttcctgcagctctgtacctctggggatcaggtgatcaggttagagggcttagtcttctgctgtgccccttgcaggccttaccaggctctcaaggactcctccagccagggagcttgctgtcagaatcccatcctcctcttaacagaaacagctgtccagtggcctgcctgcgaggggcctgcagagtgtgtgacacccaccgccttcactcattacatgcacactcatggaccaaacataccccggacactgctgcactgcatgcagaactgcagacacgggctgacatattcccatctgatggagatgagcttctacgtagcagttgtgtctctagacacctcctgcttggtgctggtggagggcaacagcggctcttttatttcctctcagttcttcctgatgctctcagatgtgttcctggtcccaagccaggggacatgcatgggcagacttagtctagacctctgcctccacaacagcaactcagctacctggagcaataggagggatggttgttccttcaccccatttcagctgccctgctcccatggtgacctccaggacttcatctcccttggcattaccctggaccagcccaccttggagaggccgtatatcgtgttctccactatccccctacttccatcacagta

SEQ ID NO: 898 - protein, 762 aa, Mus musculus
MAASMPLALCGAGYYKKKLMVTLQAWGGADRLSIPEEHPGECQREVGAVRFIHSCNSWDCLLLTTFEFLLWICPQLLPQDHTLLRLLTEGMDIQTDCPCPVSGIVQAGEEAKTLSSSSLGECSLLDLGVGQADAAMQHYGVNGYSLHAMNSLSAMYNLHQQAAQQAQHAPDYRPSVHALTLAERLADIIARYGSQHRKQRRSRTAFTAQQLEALEKTFQKTHYPDVVMRERLAMCTNLPEARVQVWFKNRRAKFRKKQRSLQKEQLQKQKEAEGSHGEGKVEAPASDTQLETEQPPGLPSGDPPAELQLSLSEQSASESAPEDQLDREEDSRAEEPKAEKSPGSESKVPGCKRGSPKADSPGSLAITPAAPGGGLLGPSHSYSSSPLSLFRLQEQFRQHMAATNNLMHYSSFEVGGPAPAAAAAAAAAVPYLGVNMAPLSSLHCQSYYQSLSAAAAAHQGPSRTKWLASFTFTFSPPLMSHLEEDCAAEASSLALVVAAIGKGFMSVFSPAATSSETQDFLEHPKFPMANPGEHYPFRRISSVFFLQLCTSGDQVIRLEGLVFCCAPCRPYQALKDSSSQGACCQNPILLLTETAVQWPACEGPAECVTPTAFTHYMHTHGPNIPRTLLHCMQNCRHGLTYSHLMEMSFYVAVVSLDTSCLVLVEGNSGSFISSQFFLMLSDVFLVPSQGTCMGRLSLDLCLHNSNSATWSNRRDGCSFTPFQLPCSHGDLQDFISLGITLDQPTLERPYIVFSTIPLLPSQ

SEQ ID NO: 899 - DNA, 22062 bp, Homo sapiens
ttgcttctaaactctgttcccccttccccacctggagcttgtgacactccagagcctggtttcatcctcatatccagcgaaagacgtggatacctccccccagcccctacccccctcccccaaaaaagaaagaaagaaataatataaatgtgaaaatcacgtgtaatcccatttgctatctcccagagataacctctgttaacatttcaggttataaccttccagacttttttctatgcatatttatacatacattacaaaaatggatcgtatcatgcatactgctttgttacctatttcccccactcaacagtatattgtgaacatcagcacatacagatacacatcattgttttaaattgcggtgctgtagtccactgggaatacctgtcccctcatttgctaaactaatcctctctcgatggacagttaggttttcaattgtttgccatcacaggcagtgctgtgataaatattcgcatacacatatctctgcatacttgaagggtacgtttctagaaatggaatcattgggtcaaagacgatgtactctctaaaggcttttgatgtaaggaataaatagctcttctgccatcaaggtaggagaatgaccatctgccactcccctagataaccctgtgtaataatttttctttatatttgctaatctgatcggtaaacaatgacctttcttttcttttccctcccccttccctctctctctctgtctctttctttctgtttctttctctcccttccttccttccttccttcctttctttctttctttctttctttctttctttctttctttctttctttctttctttctcttctttctttctttccttctctctttttttctttctttctctctgttgccaaggctggagtgcagtgacatgatctcaggtcactgcaacctccaccttccgggttcaagtgattctcttgccccagcctcccgagtagctgggattacaggtgtgggtcaccacacccggctaattttttgtatttattagtagaggtggggtttcaccatgttggccaggctggtctcgaacactgaccttaagtgatcccaaagtgctgggattacaagcgtgagccacccacgcctagcctttttctttctttggttataaataaggctgagctttttgtcatgtcagttggctatttgtatttcttctttaatgagttgtttcttcatttacttagcctatcttttactaaggtgactatctttttatttatttagagatggggtcttgctatgttgcccaggctgaattcaaacttctgggctcaagtgatcccctcactttagcctcctgagtagctgggactacaggtgtgtgccaccgcacccagctttatttttttattcctaagtaagagttctttgtatatatcatggatattcccttttatttgatttgtgctatttattttttatgaattcctctatgtcatatacagtatataacagatatttttccaaatttattgtttgccttttagctttgtttatggtatattctgttatactgaggtgtaaattcttcatctcaccatgtctatcactcttttctcttagctttctgccttgaggttatggttatggtgtgtggagtgggcttctgcaagtgaatgttgttggaggaagttaatgtgtgaatgctgactctgaagtctgtaaatctagccctcagctccagacttctatatccaacagccaattcaacatatgcttacttggaagttggattcacgtgtcagtcattcttgccatgtcccccaaaaccttggtttccattctctccctcctcagatctgcttctccaactcaatgctcttcattcaggaaaagacccatcttcactcagctgttcaggatggaaacctgagttatcctttttttttttcccctcttttcctcacatcttataactaagctatcagcaatcatgctgattctaccttcaaaataccagaatctgaccattttcggcacctcctcccactctagtgaaggcagcatggtcactagcctggacttctgcagtgtcctagtggcctggtctctccacttttcttcttgcatctctgcagttttttctctgtatagcagccaaaatgagcttttaaaaacaaaccataggccaggtgtggtggttcacgcctgtaattccagcactttgggaggccaaggcaggaggactgcttgagcccaggagtttgagaccagcctggacaacatagtgagaccctatctctacaaaaaaaataaataaattatcccagcatgatggtagtcccagcacacccaggaggctgaggtgggaggactgcctgagccccagagattgaggctacggtgagtcaagattgcaccactgcacttcagcctgggagacacagcgagaccctgtctcagaaataaaaaaaacaaaacaaaacaaaaaaacccagatcatattatgttacttccctcaagaccctccaggggcttcccatcacactcgggataaaatccagctgggatttccattgggccgtgggattagtgggattacaatgggccgtggagccctctggctagcggcccctctccctctaaccttacctccttcacctgctccctccatctgtgctccagccaccctggttttcttgctgttctacacacacaagcttgtctatgcctcagggcctttgtccttgctgttacctctgcctggaaagcctttcctgagagctccacatggctgacttcaagtttctgctcaaatgtcggagagccctttcctgaccacatgttctaaaacaatctctcctttccctcttgtcattctcctcctctgccttatttttcttcagagcccatattccagtccgacagtagtacatatatttttattcattgttatacatccctctatccaggaatgtaaattccatgaagttagggactttgctatttagtaagtgggtgcttaataaatatgtgttggatgaatatgtgtaatatacaaatggatgtgagtgtaatgtttgtgtgtagatgtctctgctgcatgagtagatatctgtgagcatgtctgtgtgtggaactgtgggaaatgacattcagtttgtgtctgtgattaaggaggcttctgtgaatgccttgccaagaatgtctgcgtacgtgtatttttgcacgaaacgttcatgtgcttgcctgcaactgtgtgtgtttgtgtgtaagctgtggttgtttgattatatatagcctgtgtctgtttcagtgaggagctgagatacctgcatatgtcttccttttatcaaatggacctgccattgccccagccttcccttttcacctcccacacttgggaaataggaaacacctttgtgttttggggagactccagatgcggagtcaattccaaaaatgacatttcacactgctgcagactgggtgagggtccggatgggaccttggcagcctcttgttgaggctggagccgtctcagtaggatggatgtcttctctgatgaatggaatatttccttggaacaattggccgtgaaagaataaggctcatgtccttcgcccactttttgatggggttgtttgtttttttcttgtaaatttgtttgagttcgttgtagattctggatattagccctttgtcagatgagtaggttgcaaaaattttctcccattttgtaggttgcctgttcactctgatggtagtttcttttgctgtgcagaagctctttagtttaattagatcccatttgtcaattttggcttttgttgccattgcttttggtgttttagacatgaagtccttgcccatgcctatgtcctgaatggtaatgcctaggttttcttctagggtttttatggttttaggtctaacgtttaagtctttaatccatcttgaattgatttttgtataaggtgtaaggaagggatccagtttcagctttctacgtatggctagccagttttcccagcaccatttattaaatagggaatcctttccccatttcttgtttttctcaggtttgtcaaagatcagatagttgtagatatgcagcgttatttctgagggctctgttctgttccattgatctatatctctgttttggtaccagtaccatgctgttttggttactgtagccttgtagtatagtttgaagtcaggtagtgtgatgcctccagctttgttcttttggcttaggattgacttggcgatgtgggctcttttttggttccatatgaactttaaaatagttttttccaattctgtgaagaaagtcattggtagcttgatggggatggcattgaatctgtaaattaccttgggcagtatggccattttcacgatattgattcttcctacccatgagcatggaatgttcttccatttgtttgtatcctcttttatttccttgagcagtggtttgtagttctccttgaagaggtccttcacatcccttgtaagttgaacagacacttctcaaaagaagacatttatgcagccaaaaaacacatgaaaaaatgctcgtcatcactggccatcagagaaatgcaaatcaaaaccacaatgagataccatctcacaccagttagaatggcaatcattaaaaagtcaggaaacaacaggtgctggagaggatgtggagaaataggaacacttttacactgttggtgggactgtaaactagttcaaccattgtggaagtcagtgtggcgattcctcagggatctagaactagaaataccatttgacccagccatcccattactgggtatatacccaaaggactataaatcatgctgctataaagacacatgcacacatatgtttactgcggcattattcacaatagcaaagacttggaaccaacccaaatgtccaacaatgatagactggattaagaaaatgtggcacatatacaccatggaatactatgcagccataaaaaatgatgagttcatgtcctttgtagggacatggatgaaattggaaatcatcattctcagtaaactatcgcaagaacaaaaaaccaaacaccgcatattctcactcataggtgggaattgaacaatgagatcacatggacacaggaaggggaatatcacactctggggactgttgtggggttgggggacgggggagggatagcattgggagatatacctaatgctagatgacgagttagtgggtgtagcacaccagcatggcacatgtatacatatgtaactaacctgcacaatgtgcacatgtaccctaaaacttaaagtataataataataaaaaaaaataaaacattaacttctacttaaaaaaaaaaaaaagaaagaataagcctgcaggaatgtggagtggggcaggccctggactggctgtgtggcctcaacttgtcactgttctttctctgagcctcagtagactcaactgcaagtggggcttgtcattcttggcctgcttgcttcttggagatatggtgagaataaagggaggtaatggcggtgaatgtatgacagtcataacaacagtattcttatcagtattcttatgtttgtgcaggaccttagggtttatctcatttcttttttttatttttatttttatttttggagacagggtctcgctctgtcgcccaggctggagtgcagtggtgcaatctcggctcactgcaacctccgcctcccaggttcaagcaattatcctgcctcagcctcccaagtagctggaattacaggcatgcgccaccatgcccagctaatttttgtatttttagtagaaacgaggtttcactatgttggccaggctggtctcaaactcctgacctcaggtgatccgcctgccttggcctcccaaagtgctgggattacaggcatgagccactgtgcccagccctgggtttatctcatttcaaagcaaatgcctcagtgggcagtctagctctgatcttggctccaagtgggcctcaatggatattggttgaataagtaataagtgtgtgagtgaatcaatgaaggtaaaaatgagtaagtgcctgagtaattgaacgaagagatgattgcataaagcagcaaatgaatttgtaaatcacaatgactaacacttttgagcacatactatgatccagtcctttgtaaaggcttctcttaatccttgcagcaaccctatgagataggtactatcatgaaccccatgttgcagatagagaaactatgggtcagataagttaaagccacaaagctcctgagtggtggacttgaggtttcagcctgccctgggcagtctgactctagagcccagagccctaaacccacactggccctgccgagtgaatcgatgaatgagtgggtgaatgaaggagtgaatgcaggaacccccacacggtaagccacgggcaagacaggctcccttccgatggagggagcttctgacccatcagaaggtgggcatccagggtctggactgggggtgggtctccctgagggcagagtctgataggcctgcctcatggcccctctcccttttccgtctgtaggcggatgccgccatgcagcactacggggtgaacggctactcactgcacgccatgaactcactcagcgccatgtacaacctgcaccagcaggcagcccagcaggcccagcatgcccccgactaccggccttcagtgcatgcgcttacattggctgagcgcctggctggtaagggccctggggatgggaccatggggacaggactgtgggggttgggggagaaggctctggaaggcaaagaggagagggagcactggccaagcttgttctagggggctcaaaaagactcaggtcacttagcaacacagagagatgtcaattcaaaactatgcatgtatatccagagtgccttttgtttgccagcactgtccagggcgctggagctgccctatgctttcaaattctcaaaacaagcctgtgagggaggcattcattagccctatctcacagatgaagaaatgaggtaggagggtaagggactagtccagagtattatggctgggaagtagctggaagaggctggaatgcccaggcaaggagagttcaggcacagggaattgtaaataacagcttctatgttctgacaccaactgtgagttaggcactgtgggagtctctctctttctgtgtgcctcaaatcatccaatccccatgtggagaggttattatttccattttatggacaaggaaacggaggctcagagaggctaaatctgggccaagtggggttggaacgtaacatggctaaaaatatgagctttggagtcctagacttgaaatcagcacgggctttcccactcagctctcttctctgagcctcagtttctccttttataaaaaggagacaatggccatgcccatcccctagggtggttgggaggtgatttgtgatgacatatgcaaagcattcagaagagcctggtaggtgctcagaggtcattattacccaaagcccaaggtaagtacccatatatgcctatgagggaccggcagtctggtgccccacacctggttctactgactgttgccctgccctgccagcctctcggtgggtgagaaaaggattcagtggcatggatggggagtttgatgtcctgggaggtggtgccacccaccccatcctgtcccaggtccagccttgagcagctggtaaacccacatgggctcagccctgtgccaggcaggcctcagaaaacttcagggaactcctagggagaacaggtgcccatgacccatgagagggcacaacaggagggtatccaaggtcaaatgctggggcagctcagagcagcaggatcagctggggtagtcaggaagagctttctgaaatccacaggggcaggaaccaggcctcaaaaaggccaacatgagcaaaggcacagaaatgggatgggatctccacctgggtagcagcactggcctggcagggagggcatggccagtctcactcctttagaccctgccaggcctctgggcagaactcagtggataaaggttctctggaccagtgtggaggcattagtttctagtgtggggatgttggatacagtcctatgcacaacctggtggtgacatcagctcctgacagtattccaggacccaaggaccagagcacagagaggagtcagggacagggggctcatgtccgctggtgggggcagaggaactggggtgttcagcccacccccaactctctaattcttaggaaggaaggacatgaactccaagtgagcctttgtatggaggccttgccttccagcagaggctctgccggcggtttagagagcctggcttccctgtgacacctacacgccccccaccccccaccacccaccacccctgcagtccctggagccagcagtaggatgctgagctgttgctccttccccaaccagagtggggctgacagagcggtccccactccttcccctgccccaggatgactcagctcagggctgagtcaggcctaggattaaggtcagtctgtgaggggttcaggactctctttttaaactgaagaagaagtatctcaaagtctggggcttcctggatacccagttgcctcttcctattctttttttttttgcggaggggggatggagttttgctcttgttgcccaggctggagtgcaatggtgccatcttggctcactgcaacctccgcctcctgggttcaagcggttctcctgcctcagcctcctgagtagctgggattacaggggcccaccaccacgctcagctaattttttgtatttttagtagtgacagtgtttcataatgttggccaggctggtctcgaactcctgacctcaggtaatccacccgcccaaagtgctgggattacaggcgtgagccactgtgccgggcctcctcttcctatttagggtgctgtggatgacttcccattccctggagggcgggggaaggactctggcacccctttgcagaggctgagatgactcaagttcccttcagcacaaacagggcaggatccacttatgacatgatgggaggcagtgaggagagcggttactgtctatccttcaggggctagtcaagtgaaagggctgaaggctataccccaggatggaggctagacctcggccctaggtagacacctatcctgggtggttatcatgttaccagacatgtggacaggactgtggaatcaatggtccatagtcctgtctcccctacaaacccacagtggttggaaccaggtctctttgtccttctgttcttggggaggcagccacaagggtcaagactgagtgcaacaagccttacctgagacgtgagccctgccacccccaccctccccgctccactcttaccccttagccaggctctctgttcaggaaacagaagagtaggagcctgaggccctgccatcagagactctaggccagctgggatgagggggtttacatgcagaggacagagaatcaagtgctggtgaattctgtctgcctagtcagtcctcccttgactagaccttgagatgggtaccagcccagcctggcttctcatgggcagggaccagtactctgatgctaaagaagtcttagtattcagaatctaagggctatagggtcttagaactcctgtgatatggacttacagattattagcatcatggagtctcaaagtatactcatagtatccatcttagggtaatacccacctacccaatcccaatgccaaataatgaagacccccctcaatcatatgcctgacagccatttttggagttgagttagacctctgtggtcctgatagtgcataatggggtggagagaccttgaaagcccacagccatatggagaggggatggctgatttctaagggtaagggaccagggccagctctggcagcagcctgggtgtccacagtgggtcagagcaggataagattcaaagctatttcccataattaaatgggccccctctccttgccctccaacggctgtacatttcaagacatcatcttggaggcccgttatggttcccagcaccgcaaacaacgtcgcagccgcacagcgttcacggctcagcagctcgaggccctggaaaagaccttccagaagactcactacccagatgtggtgatgcgtgagaggctggccatgtgcaccaacctgcctgaggcccgggtgcaggtagggcccaactctcctaactaggccttgcagacaaacaccagcccatcagtctgcccgcttgtccaggagccagcatgtcatccctgtgccaaggtgcaactgatctctccatcaaagccttcagtgataggaggggagtttgggaagggacagagggtgtgcattccctagaggggtggggggatgttatcacgtacatcctctcccagagcaccctgctccacaccaaccccacttctttcttgcccacctcggactgctcctttcccgtccccaggtgtggttcaagaaccgccgggccaagttccggaagaagcagcgtagcctgcagaaggaacagctccagaagcagaaggaggctgagggctcccatggggaaggcaaggccgaggcccccactccagatacccagctggacactgagcagcccccacgtctgcctggcagcgacccccctgctgagcttcacctgagtctgtctgagcagtcagccagtgagtcagcccccgaggatcagccggaccgtgaggaggaccccagggcaggggctgaggaccccaaagctgagaagagccctggggctgacagcaaggggctgggctgcaagaggggcagccccaaggcaggtgaggtctgaggggtaccatgggagggctggggtctgggggccctgagcgtgtgaagcaagtcagaggcgagtaatcaactgcccctcaggggcatggcgcatcagaaaggactgaccacagcaggcctgggccaggttttcaccctttagttgcagagccgtgggaaggtccagggggtcctgagggacgggctgggtagcaggggtgggatactgcgggagctcagggcaaaaattatttatcaaccatttggaagtattccaatattttaacaaccagttggatgtcccagtgcatactgggcgaatactgtattagtaccagagattcccacgtgcagcagagactccgagcacatttctgaaggaacagagctctggcatgaggcatatctcagatacaaaccctaagcccagcagggaggggacaggggctgtgagctgaaggttggagtgaaggaatgggagctctgggcagggtgggggagggggaagtttacagcccttgaaaagaaaaagagacagacgtgggggccttggcagggtccctggagctttcccaagaagcctgggtccctttctcctaggattctgagccttgcttcaggggatgctctggctgagatgggatggatgtggtttcagccgaagcctgtcttgtctatagtgccaaggaggtgagaaggctgagtgcacctctcctggcagaccaatgcccttgtcctgagggctttgttcttgggttctctgcttgcagattccccaggcagcctgaccatcactcctgtggccccagggggtggcctcctgggcccctcccactcctattcctcgtccccgctgagcctcttccgtctgcaggagcaattccgccagcacatggcggccaccaacaacctggtgcactactcgtccttcgaagtagggggtccggcccctgctgctgcagcggcggctgctgctgtgccctacctgggcgtcaacatggccccgctgggctcactgcactgccagtcctactaccagtccctgtcagcagccgctgctgcccaccagggtgtgtgggggtctcctctgctgcctgcacccccagcaggcctggctcctgcatcagctaccctgaacagtaaaaccacaagcatcgagaacctgcggctccgggccaagcagcacgcggcctccctgggactcgatacgctgcccaactgactgtctggcttccaacccagccaggggtcttaggtgtcccctcctagccctgtggttatccctaggtggctctcgaggagttaactccatgagcccagggatcctagggcctggggtcctgttccctgctccgcttccccataccccagcccgaggtgaagcccacacctacacaccctctgcatggccctgcctggaccccatggaggccgaatagggaggaggtgagaggctggggtgccccaagcttccctcggagaagtgagaggctctccctggctagatcctcatctcaatagcacctcctcccttttctccctatccttctgccccctagtaagtctacgtgtggaatgtgagatataaatataaatatataaagctatattttcaggctcctgcctgccccaggccccctgccccactcccatctcttcttccctgccacccctccctgcagcctccgcggctcactccagccatcccttctgtttctccttctctctccttccttcttcccttgatctccctcttcctgtctctgtcctggtccctgcccccgtctcggcccagcctctgtattctccacccttgatctttctccttgtctctcccgctgcccctggtttcttcctttggtgttggctgtgttggtatcatcagttcttgagctatattttgtttggggttgtggctggttttggttttagtaattttgcgacttcccgttgctctccttctattcccttccttctgccctgcctgcctccctgcacctgcggcctctctaggaagctgttcctttctatgcccaatagaagcaacaaggccctagctggagactctggggatctggagctgcaggcaggaggtggcactggctcccactcccacccctgcccaggctggcatctagaaggcgtcatgaattactttctcttctctcttctcaattttgaggtcctcattcccaagattgaggaggcagtagttaatctgggaaggcagtagaatggccagcattcctgcctgtaagtcttcccaagacagaggcctggtgacacagttcagccaggactgaccacagggctctagagctctctttggtgagacttccctggatggagagcagcagcaggggaagaggtgctctcagagacagcagggctggtgctcttctcccacaagctgagcctccacgttcagcagatactgtccaaggcaggggtacggctgaccaggaatgaaggttgaactctgctcctgagcacggtgcgtgcaaagcatatagcagcacataggctcaggcttctgtaggcttcctgtcccagagccaattatggaagtaagggcttccctccagctagtcactggaatggaaaagtgtgttcctgttcatagccaggaaacccagctcagcaaactccctttcaaagctgtgtgaccggctgggcatggtggctcacacctgtaatcccagcactttgggaggccaaggcaggcaatcacctgaggtcaggagttcaagaccagcctggctaacatgtgaaactaataataatacaaaaattagctgggcgtggtggcacatgcctgtaatcccagctacttgggaggctgagttgggaggattgctgcaatctgggaggtggaagttgcagtgagccgagatcatgccactgcactccagcctgggcgacggagtgagactccatctcaaaaaaaaaaaaaataaaaataaaagctgtgtgaccttgggcaagcctgtagcctctctgggtctgtttccctgtctgggttagatggcctgtaaggtcctagccagctctacattctgcatttgctcgcaaccttgtaacacagaagtttttagttaaattgacaacagaaggttctcaaaagcacaatatatgaagtaggaaattactattgcctttctgtggagcaaggggtgttgtacacacaagcctcactgtagacactgcctcagtttccccataggcataatgggtcccttctagttcaggcaatctggatttgatcttgagttccagtgccagcctctggagtcactccattttcataccttttcatgatctcaggggctctgggcagtgggaggtgatggcttggacagattcttggtcatgctccccaactcttggtggctcaccactgaacactccaaaccctgcttaaagaagttgatctatctgaaagccagggtaaagattgctaaggcttgtctcctctcccagtgggaagagagaggttctgttggtgtcctggttgaattgctttgcagagaagtcaatgcccatcacccttgatgggggtcagcctaggctggggcagatggagaaggctttggacaggaaaaaagtgagcaggatggtagtctaggccaggagaagtgtttgaacaaagcagcagagatgagactcagtagaccatgggaagggggtggctggcttcacgagaggtggggctaaggggcctggaatccaggctaaagaccacacctacatgtggcaagcaccaagacaggcatttgagggtttccaaatcctcaggtctcttgctggggtctggaatttggaaggggaatccaccagccatgggggcatcagaggagagacttaggcagcgctgtgggaggttggcagattccaggagtgacagaggaggtttttggtttgggagggattttgtggccaatagcccatcaactgtcctctgggattagccccaggaagttctgtttctaaaacaaaaaataatcatctggataggtatgggaagcttcctagctgcttttaggctgaagctttttgtcagttcctgggtacaagtgactgtcactaggccttggaatccaacagccttagatatcactacctcctccaggaagcctcccctgaactcctaaggggcaatgttctgtcatggctggaggcaggcccaccttaggagcagcccagcttccctcagatgtttgttaacacttgtcccattcaattgacccaaatctgccagagaaggcagggaaggtacatgtgatccctgccctcggagggctctcaagtttagggcaccagccttgggtactgaaagcagctggagagcaagaggagaggacacctgtgtctcctccaagcacactggtaagcggcaccgtgcatctcctctgagcacgcttgtaagcagcaccgcgcttcccttcttgtgggcagagggtacaggcccaccacacctgatgctggagcccctcccaggcctgctgggccaacctgggcctgaaagccagaggctcaagctctgactgtcccttccaggaatgcctcatgcctggcctctccctgctgtctgcgtctccatttctctgtttcctcactccctcagagcatggtccaggggcccggatcccaaccccaactccaaggctggtgggctctacagactgctttccaaaccagctgttttgtgaccatttgtgcttagaggtcgtgccagcccatggcaaagacactgtgtagtgtatttatttattctgttagtggaaaaaaacaagacttaattcacccctgcctgtcccctcgcctgccccctgtgtagtgctgcatgacactctgtgtatctgtccttctgtcagtctcattccctgtgatgttgtgacctgttctttgtcttacttggcgaataaaagagaacccagcagcccagacctcagtccatgttcattcccagagatgcccgcagtggcctgagcaggcagtgtctccaggtctgttcactgcccctctgatgccatggccagtggggagggaggcggacctactgcactattggccattgtcacactgactgtgtagctctctctgtggcccttactaatctgcagccgggatgccactctggaatggctgcaggggagcagataatgggagacagttccatcttctctaggctgtttggacctcacccaaacacaagtggcagagtagcctgggacatgggacgcctgagacaagcaatgcctgggagtattcagtgtagcttgggagacggatgggtctgcaggacagagagaggcaggggactctgtggaaaactgcaagtaagccagggccaaaggggagtggcaagaagagacatttggatctacagccagagctattttccagtggaaagggaggccttcagaggctgtgagctctgtcctcagaggtgagcaagcagaggatgaaggagggctttctgccatggtgcgctggggtgtgtctgtgttattataagtctatctgcaggtctgagaacctgtgctatgaattcctaagtgtctgcttgcatctgtgtgtgtacgagcacattcacgatgagcaggagagacagcgcgagatagacggcaagaccgtacatataggcaataagtgcagaaaaaatgcacagccaggaagttcttgctgtgaaaccctggtccctccagctgcatttcaagaaaaagaagacaagagatctctgctcagtcctggctgctttggctccaccttcttccccggtgctccagagtgccggcgcagggccaagagccagaagaggtggtgcatgcacctggctgaggtttaggggaggtgacagtctcctctgtctgcggatttcctggtaggagaacccagcagacctgaatgtatgcagggagctgtctgctaggcttcccaggggcgggccctgacctccccacttcccaggtccaccccaggagacgcattcctctctccccagcgggctgaggattagggcggggagcgtctccctttcaccttgtcccctgcctccctgggaggggctgagagatcaaatatctgcctcaaatctcccactgctccctcccctggcctgagccattgactgcctcctacgtacttcagccccaagggacacaccttccctggcataaagggtaccctggtaacactgcagttcaaatcactcatgcactcagcatacacagagcacctgctgtatgcctatgcctgtgctgggagctggctacatagaaacaagtaaggaaaacactacaacacagggtgatatggtgttcaaaaaatggagaccttgggatgggcacagtggctcacgcctgtaatcccagcattttgggaggccaaggtgggcagatcacctgaggtcaggagttcgagaccagcctggccaacatggcaaaaccctgtctttactaaaaataacaaatattagccaggtgtggtggcgtgtgcctgtaatcccagctattcagctactcgggaggctgaggcacaagaactgcttgaacctgggaggcggaggttgcaatgagccacggcactactgcactccagcctgggcgacagagcgagcctctgtctcaaaacaaaaaacaaaaaacaaacaaaaaaaaggatacctgtgggagcacagaagaggacccctagctcagtctagggagatcagaaaggccccttgggagggagacttttgacctgagtctcatgggtccagtgttcaccaggaagtcaaagagaagggtgccctgggagaggcatagctcatagaaagctgcaggattgagccagcttgccaaagccctgagccctgaaagaacaagggacttgtctgggtggggcttgaggatggtgggggtggtgccagccagtgaggatgaggagggaaacaaggaccttggactgaagcccaagggccaagggtgtgggaggcactggaagctattcccagtgagggagtggggtgatctatgcgtattttagtaacccccactttcgctgcatggtggctcatgagaaggaggtgggggcaggagatcagagaggaggccagtatctgtcacgtcctggtgagaggagggtggcatccatctggactgggggagggagtgcagagcaggggtctgattgatgagagatttcggaaggaaaattgttgtggtgattttaagcaggatggggagggtcaagggtactttcaagtctctggccaggcaatagggtagatggagacccctactctgttggagtggagtgagtgtccgaaaatgatcctgagctcagggtagtcttgtttgctgcatttgaggagacttctatttattcaagggaagatgtagggtctgtctctgctgctgacacagactttctctgtgcctggcaccttacacgtaagaagccacttggctgggcatggtggcccactcctgtaatcccagcactttgggaggccgaggcgggcatatcatgaggtcaggagttcaagaccagcctggccaatagggtgaaaccctgactctactaaaaatacaaaagttagccgggcgtggtggtaggcacctgtattcacagctactcaggaggctgaggcagaagaattgcttgaacccgggaggcagagattgcagtgagctgagattgcagcactgcactccagcctgggcaacagagtgagactctgtctcaaaaaataattaataataataataataaataaaagaagtcacttaatccttacacaactctatgaggtaggtactattactatcctcatttacagatgggaaaactgaggtacagagtggttaaataacttgctgaggggccacatagctagtcatgggccaaccaagggatgaacctggctggcctcagaatccatgctcttagccttgatggttgtcacagggagatggtgaatgaagccacgttgctaaatgagattacagagagagaagcagaggatgggacctcagggaaacgctgaccacaaagagaagaagaagctactggtggagccaggatgagctaagcctggcttgctgtttactgagggcaaataactatccctctctggtctgcagtttcctattctgttgaataggaatctttaaccaggtccagcctgcttcctgggtgactcagaggaggtaaaaaggagaaggcactggggaggctgagaagctgagcagttctaggcccagcgtgccgttggtgctcagatagcccatggtgggggaaatgggaaaggtagggggctccccgaagcttctctccaaattccccacgttctctctttcttttttttgagatggagttttgctcttgttgcccaggctggagtgcaatggtgcggtcttggctcactgcaacctccacctcccgggttcaagggattctcctgcctcagcctccccagttgctgggactacaggcgctgaccaccactcctggctaattttttgtatttttagtagagacgggtttcaccatgttggccaggctggtctcagactcttgacctcaggtgatccacctgcctttgcttcccaaagtgctgggattacaggcgtgagccaccgcctggctgagccatggcgcccggtagttcccccttctcttaggccttggccaatgttcttgcagctcaggggtctggttccttaggggccctcagggaaggggcccctgctgagagggtctggggaatggacccctttagggctgggcacttccctcatctctttcccacagagctgctctgggctggagccctccacccccatcactcattctcctttagcttctgggaaagccgattaggaggtggccttctacccgcccccctgacaagtgtgtctgaacttccaacaaaggccctcagagggttgcagagggagggctcagcactgggaacctgacaccactggccagggatcaccccagcagcctaggaggcagctctgtggggctgcccaccccacggcaggcaggaatgtcgctctgagaggggacctggtcccacaaaggcctgggggctgggctggggcaggctggagaggtcttcacctgggaggcctcacaataaggaagacagcaagggccagcacccaggaaggcacgtgggaataggcatacacgcccccacacactgacagcctctcacacacattccccatacattcacagcacacacgcacacacgcatcctctcacacccctgggacatgttgacttctgcactggaccacacaatcccagggtgtctgtctccctgtctctcatgcctgtgtacacagccccactgcaaaccggcagacacacagccacgctctttcgcctgatgctccacacacccgctccacccccagacatgcattcttcccggcttgctcacactccagacagcccctgaatgctcagtggcaccagctcccctgtacagacagcctctcgagccaaactgctggcctggtgcccacagagacttggtggcggctgccctgtgattgtggaagatgccacccaaatgcccacataagagtcagacactggtcccagctgccatgtgaacacccatgtgcaccaacccacacatccaccccaaggggctgccttgagcccacctcttcacagcatgctccctcctgcagcagcctcatgggcgtgtgacccatgcagtcacacagggccctgggctcagagggcccgcaatgttctgatgtcaccatcttgaaatctttacattttaagcaaggggcgctgcattttcattttgccctggaccccataaaatatatagctggtctcactcccaccccatttctatttatttatgtatttatttgagacagagttttgcatttgttgcccaggctggaatgaaatggtgtgatcttagctcactgcaacctctgcctcctaggttcaagcaattctcctgcctcagcctcccaagcagctgggattacaggcgcctgccaccacacctggctaatttttttgtatttttagtagagacagggggtttcactatgttggccaggctggtctcgaactcctgacctcaggtgatccgcctgcctcagcctccccaagtgctgggattacaggtgtaagccacagtgcccagcccaccccatctctttcagctaagtcactggcccttctgtggcttcagaaacccaaggcctccagaaagccctctgcttctcccacctgcccaagggccaccacttcctcttccagccacggtttccttctccaccccattcctcatcaggcaactgagtgtgaggggtggagggaactaccaagagcttcctatacacacctcctcctagtgtcaccttgggactcagtattctccttggtaaagtggggcgaatgataatgcctacttcagggttctttgttaggaataaaagataacatctgtaaaacacttagcacaattttggcatttagtaaatgctcaatacttgcttgtttttttttttttaaatttgtttttacttttattatttgagatgaggtctcactgttatgcccaagctggtctctagctcctgagctcaagtgatccacccaccttggcctcccaaagtgctgggattacaggcatgagccacgacgcccggccaatacttgcttgttattattgcacttattacattatgataagtgccactaaacaaaagtagactcagttcctggccctatatatagtctagtggataaaatggagattactcaaataatcacacatatatccacgtaaaggagcaggggtgaatgagaagtgcacacgtctctgacctcgaagggcttacggctaacaggaggggcaatctgaggctagattcaggatcaatctagggcaagacacagctcgattagaggtcagagttggagctcagaatgggccatggcaggactcagtttggggcagggccggctcagtctgtgactggtgccaagtcagtcacagtttcatttctagcactgactcactgtggactatttaataagctgctaggcttctgggaacctctgtttcatcatctgtaaaatggggaggtctctgtctacccccaggcttgtgggagttgagtgcggtaataatggaagtgaaggattaagcttctgttgccaccactaatgactccaagcccggcccc

SEQ ID NO: 900 - skipped

SEQ ID NO: 901 - protein, 306 aa, Homo sapiens
MGPLSLPSNGCTFQDIIARYGSQHRKQRRSRTAFTAQQLEALEKTFQKTHYPDVVMRERLAMCTNLPEARVQVWFKNRRAKFRKKQRSLQKEQLQKQKEAEGSHGEGKAEAPTPDTQLDTEQPPRLPGSDPPAELHLSLSEQSASESAPEDQPDREEDPRAGAEDPKAEKSPGADSKGLGCKRGSPKAGGGLLGPSHSYSSSPLSLFRLQEQFRQHMAATNNLVHYSSFEVGGPAPAAAAAAAAVPYLGVNMAPLGSLHCQSYYQSLSAAAAAHQATLNSKTTSIENLRLRAKQHAASLGLDTLPN
